United States Patent Application Publication US 2021/0254056 A1 - sequence listing, part 36

SEQ ID NO: 69848 - DNA, 1954 bp, Homo sapiens
tgggggcggtgtctgaattacagtctccggggctgcagaaagatgaactccatcagaagatcctcaaggtcttccccactccttcagtgcagacttcatacagagaaactgtctaggcgacacctgtgcaagaactggacacgacccaagctgcaaactgcccctgaccatcccggccttccccgttcgatcctggaggtgggggtgggaatggagcgcccagagcgggcgatcaagcttcctgggaactgtgaattggggcgggggaagcaggaaggacgaggcctttccagaccaaatggccctaactcctgcaccggaccaggacgcgtggcgcctccagagaggacgcccatcgcccggagcaggttgcggtcccggttcccgccgaactctagcaaccgcgaggagaaatgtctgccgtagggggcggagcgcagcgggggcggagcgcggacgaaggggcggagcgaggacgaaggggcggagtagaaacgacgggcggggggcggagcgagaataatggggtggagcaagacggcgggcgggggcggagcgaggacgacggggcggagcgcagaccgcgggcggggggcggagctgggatgatggggaggagcgaggataaaggggcggagcacagatagaaacaggggcggggaggggaggggcgttctcggcctttgggacccgcctctcgccgcaggcgcgcctgccccgccttctcactccccacggcggcggctgcggaggccgagggcggggagggaggggagagcgggtcacgacgctgccggggcggggataacccctcacgtggagcagatgaaagggccgcggcgcgacggccgggggagccgagctgagcctgcgacccacaaagccgccgccgccgccgccgtgatggggctgtgaggcgtccgcccgcgttcggtcctcagccggcccgcgactatgcccggccgcgcccgccctccgcgccctcccgccgcaggaccatgaggccgcgctcgggcgggcgcccaggggccacgggccgccgccgccgccgcctgcgccgccgcccccgcggcctccggtgcagccgcctgccgccgccgccgccgctgccgctgctgctcgggctgctgctggcggccgcggggcccggcgcggcgcgggccaaggagacggcgttcgtggaggtggtgctgttcgagtcgagcccaagcggcgattacaccacctacaccaccggcctcacgggccgcttctcgcgggccggggccacgctcagcgccgagggcgagatcgtgcaggtagctgcccgccgcccgggccccgcgccgcctccgccacaagatggctccgggggctgcgcccgccgaccccgccgcgggctgcctgactggcgggcgggcgggaggggtggccgagaggccggcggcatccctcccctgcgggcgggcaggcgggcgggacgcggcctccggggcgcatccgcggggggcgagcgcacgtgggggctagagctcctgtgaaccccggggcgggaggggcatcctgggcccggcacccatgctggggcagcccccttggccggttgggtatttaggtctgcctcaggtggaagtcccgggaactacctgttgaatgccaactttgaaaagacaagtgatgagggatggggtggctcgtttcaggttgcaggctttgcttttccatccatgcatgttctttttgggtgcggccaggtttgtctgaagggctgcacaacgtcgggttcttccccggaacctgccgtccgcctcacctgggcgccggtgacccttctgcggggctctggacaagcagcagcaggcaggggaggaggcggagctggtcgaggagtggggatcgggggttccctggagtggcgatggaaggcagccctcgctgcatgcttcacattacagagggtgggagggataccgcc

SEQ ID NO: 69849 - DNA, 1005 bp, Homo sapiens
agataaataaatcacatgccaactctggcctttagctgttattagtaacaaatagctttctacccgtacacttgaccattcatgacaccttggaagaaaattgctgccatggcatttgaccttggttagcactttgttttttctgagagtttttttttatatatcatgagtatgtagaaacttctggggagcaattcctcagttgcctttcgagtcctgcccctaacccctcagtttgggctccatctgttgactgccctgggtttcagaagggagatagtgagtgtgctctcttgaacatggtcctttaggattaggcaatagagtggtaggctggtttagacatttctggttattgacaggccttactgcggcttcccccaaatgaatgaggaatatatttttctaaatccagccagtgagccaaatgagccacactgggataaactttgtttgtttacaaattatgtaagagaagggcccggccattaaattcttctgagccagaattcctagccctcttcaaagttgtaatcaaactaaacaaacactttccacaggaactaactccctcccgagaaacaggagcagatgctcctgggaggccttcagcaactttggaatgtttaaagtagaaatatgtaaccaaggtgaagttgttccagaaacattgcctgctctggccagaaccaaagcacgtgtcagcttttttatttagggcaagaggtgcagaatggactgggccagtccaggcagaattttctttagaatgtttaatttttggttttcatcttaacccggcttctcatagtatcagctccttgtgacctttattcccttctgcttaagtaactctttttttaagcttgatcttatctcttatcttttagctatgctggattacatccggggatcaaggagcccgcctcttaaagcactcaattattgtccctaggaaagatgtcagctgtagcacaaacactccaggggagggaggctgaggct

SEQ ID NO: 69850 - DNA, 786 bp, Homo sapiens
gccaccctcatgttattttgaagcaaagccagccatatcatttccctgcccgtaaatatttctaaaatatctataaaagcttctttttaaaaaacatgatctcaaggctgttcccacaaatgttaagctagtgatgtcccctcccaaggggcaaccccacactccctgagagatggtgtatgtgtttcactgctcatgcactggcagccacgtctagaggctgggtctggggtggagcccaagtggggtgggggaccgagcgggcgaggccatggctttgcgctggccgggcaatcatgatgatctcggatcccgcgtgggcgctgtgatggtatcggctttgccccgggcgggaaccacaagatcaaaggcgccgcgcaccggggtgcttcaaagccagtggagcagcccggattgatgcccagaatgagagctctctgctgatgtaatcgtagcctgtgagacaggttctttttttaaatttaaacaaagacaccccttgtttgtttagtgaggtgaagcatgtgttgcagagggcacgcagcatctggagggctccactctggcctggtgggtccatggtagggcaggaatgctgcaagtgactagaattttcaggcgggcttgtagatcttccataaaagacaacctgtttctgttaagagtaatttttttctcccttttttagtatagtcaggcttgttctcaagtgactttcctgaaatactgaaagtgctttcctctggtggggttgtcaggctttggaacacacctggtgagccagct

SEQ ID NO: 69851 - DNA, 887 bp, Homo sapiens
ttagcaaatcttgctgacagatagatgaagaagcctgccaaacggagtcagcttgttggatgctgaggtccttcccaagatcttccctacatcagaattcagggtcagtggggtctgaggcactactcaacttaagtcatagtgactaaagtccacttcagcatcttacagatgtcccaaccaaacccagcatgtgtaaaaccagatttctcttctctccacaaacctgtttctgttaggttcttttgttactccagctaaaaagctggtgtcattctaagctgtttatcctcaatgaggtgtccccttctctaaccccatgatgcctctacccatgcacattgaattgtctgtaagttactggaaggcaagactggaagggtttttccttcccttttaaactacaaaccaggtttcccccatcttctgtaaaagcaccccccaatattgtgaatttcaagcatgcaggaaaagtgagagttttgcagtcgacacccatatacccactatctatattccaccgttaacatttcactgtatttgctttcttacattttttatctatctgtgcatgtgatggggttttttgagacaaggtttgcccaggctggagttcagtggagcaatcatgaatcactacagcctcaacttcctgaactcaggtgattctcctacctcgtgatgggtttttgatatttgaaaatcaagcacatgggggctgagatgttataatggatgtgacagagtatgtaaggttccctttttaatttggtttctatcacttttagatccaggtctccccttctctccctatctactgcctccccgctaaccaacccctaccccatcccctggctgggaatagccctagagatcttgcgtctttg

SEQ ID NO: 69852 - DNA, 898 bp, Homo sapiens
catccgtctgtccatctgtgcaacaatgcaaggtactgggaatattgcagtggaaaagacaaaaacccctgccctgtggagccaacattgtactaggcaaaccagatcctagcacattgtcaccctagaatcaggaggactcttcctgcccagttccactgggctagacatgtaaagagaatatgtgagtaatagctaaactttggtcttactcagctaaactttggtcaaatggcaaaatacaggtgaggttcctatggacagagaaggcagatggcataatggggatatgctgagctcagtgatgcatcactgtagacagcttgagaactctaggcatgggccagcttgggacagaggccatggaagagacaggtgtagtgcgtggcacctgtagctgaggcttagatgataaccttactctgctctagcatggagaggacccgttcagccacacctgtggtcatcattgagtgcctgtttgtaaccaaggttgaaaggattgaagaagaggtctgtgtgataagtgggaggtggaagagctgatggcttatcttagctggggaggctgttctgtctcctggccttggtttcctcacctgtaaaataaggccggtatctcaaaggtcacccaggttaaaaaaaaaaatcttaactttgttgagtaagaatgtaactggttgcctctttgatctttgatcagtgatccgcatgagtggagagaacctgacttttcctggtgcctgctgcctttggagtgagtgcaaaatgtccattttgctgatgacaggctccctgttggcatgtacagagaatctcaggcagtgtgagagtgtagtagccacctagcaacattgggtctttgtgcgcatgtccttgtgatctatcaccatgctgc

SEQ ID NO: 69853 - DNA, 3209 bp, Homo sapiens
tttcataataagaacgatcaaatgtcctttataagttgccttgcaatttgaagtaaaactgtgtgagtgaatttctgtgtagagaacaatacttgtcatctggtaggcacatgagtcactctgagtcacttcaagaatgaatttagaattaatttagcttaaggtttctatagtctactggatacttaaaaaaaaatttaacttacgaggcatcttatctatttgaaactagcaacagccattctaagtgagggtttgtaaagtcaggcgtgagatatacatggggccatatgtaagttttaacataattctctgacaaaatgaaattctagggcgtgggagatactcaagagaaaaggtggatttgaaatgccccctgcttccccaagtttctgacaggtcacttctcagttgtgcatttggtacagaggaatgaaataggtatagaggctctttttggtttttctcaaaaaaagtgatacccactgggggagactccagccgagtgttctgaaagccagagtcctcagccgagagaactccacagtcttcaggccgttcccagctggaattctctgtgaaacagcagcaacagccagcagctttttggtgtctggggtagtttctgacccatcacagttcccttcattgctatgacaacagggagaataattattcaggttctgtttgattctagatccagaaaaaggtttaggctctttgttcaaagagcaaaagaattgtccgtttctttgtacatagaagagggaaaaaaaatccttatgattcaagagaaaaatgggtgcgtctgtcctttttcctttctttcacgtaaattataagtcttggttctagccaccacaccttttaagaaaaggtctgggactgatgtgagactctgtaccacagcgacaccctaccctggccgacagtggcaaaagaacaaaaggaaggaagtttcccttttaaatccccaggaattttttgatgagataatattacagagtgaaatgtctcgtcctcctattagtttagtatttggcttctgtgtaacagtaacccacttagaagcaggcggctcttttgaagttattttaaactctcagcctagtgtagagatttgtaaccttggataaaagcaccactagccctagtttcagttttgccctttcagacatgtggaaagtgcaccagtatatctcaaggattttgtactgaaagcttcttaaagagctggtcttggtttcaaagtttggcttgatgtaccatactcaagggaacatagttctttttctccagatatttaaccttgtctgacatcgtcttttggcttcgaagttcccctagcttctttgtccattaacaaaacatgaaaccacatgaaaccatgatagtcagtctcactgggctctgaggaagttgaagaaagttcatcttcatatttaaacataaaaccagttgtttgatacctggtaccagagatggccaggtatatgcattgcttgttggtagcattttgccttagtaactattcagaaatgcaagtggaatgttgagttcctcttctagaggttatatctgtatctgggagaaaattggagcttctcagaacaatcaccctggttattgtgtctgccgtctctgtaacacccaaatctatatcacactctgatgccacctgggagctatttttggttgcgaagggtggtgaaagctgctggttctttctcttaccgtgtgtccctgagtcatccccagcccacgtcctggatggctcccagaacagccgtctcagacgaagtctcccttcagatgtccactcctcagtgcagggggcctgtggggtctctcttggtcctgatgaaatccttctctgccttttccagtgagaaggacccatagaatctgctggaacacttggagaaagggacttatttccagcagtgcataaaatttttgattaaaataattcacgtgtctgtttataaaaagacaaagcgtacatcatggtttataataaaaaagagcattatcttgtttcaccttcaccacccctgattgctattcccagaggcaaccattttcaattctttagtggcttcttttgtcttcatctctgtgattctttctaaatttctgtaactcttatagtcaattgcagaataatttattgacctcctcctgtagaaaaagattttgcttttcactcccctcttctcattcctgcattcttccaatgtagttatatcacataggtcataccctgattatgggttccaatcctggtgtaagtttttgttttttttctggagttaatcattgctcccctcaccctggccctccattactttagtttgctgtaactatcacgtgtcatcctcttgttcagaactataaaactctcctcagtaccatctaacccactgggtaatgagtcatatttttgttgttatttgtttggctgtcctgtagcctcatccttctggccccatctggacctgtcattcaacaggctggttgcaaagccatcgtcctgggatttctctttatttctctaatctgtgggagtccctgtgcttggatcccatgcctgccttttccttagttttatttctttgttttgttgttgctgacagcaactcctgaggttggacgtggatgggaaaatttgagacttgcttttttggggaggacatcttctattctccttccccttctactgtcctttcaaggtgctgtcatggtgaagggcaccagtgttgtggtctctgtgtatagaaagcagtagccaccccagcgttcttgggctgctgtggccccacagcaaggccaaggaggagcagcctttgctcctataccattgccagtaaatcttttttgtcctggaaatgtctttgatgactcagtaatcaataactgtaagagctaggtctttcaaagttcatgcagcaagttaattaaatcctgacctatttgccctggtccctcacttagcagagcagagacccaagtggctcagcaaaaacagcaagagacatggcagcaggcctgcctccaggccagaggtcatttgttcagccagcagtcatttattgagcacctgttgggtgcaaagctctgtgtagggtgaaaggggacttctgaataagactgtctttctagaagcaggtgcccatcttagaggggaggctgtaggaaccagtaagcac

SEQ ID NO: 69854 - DNA, 1146 bp, Homo sapiens
cctagtatttcttaggagaaagtagaaataaaggtttcattggggctatatcttaaaaaataaaaatgaaagtaatggtttatatttaaattataattgcagctttgtactgatttttgagaataaacaaagattgaatctcttgtgggccatgcggggatattctcagcaaaactgtataagactgtgcatatagcatccttcacttaggtttgagttcagccgggtgcgatggctcatgcctgtaatcccagcgttttgggagtccaaggcgggtggatcacctgaggtcaggaatttgagaccagcctggccaacatggtgaaaccctgactctactaaaaatacaaaaattagctgagcgtggtggcgggcgcctctaatcccagctactcaagaggctgaggcaagagaattgcttgaacccgggaagcagaggttgcagtgagccgagatcgcgccactgtgctccagcctgggcaatggagactccgtctaaaaaaaaaaagttgttttccaactgagaggactctcactttttccaaaggtctctcttaatcctttgatcattctctgtggaagctcccatgcgtgtttcttcttctttaatccttaactagattgtttgccattggctttgagtggaatccagttgttgactaataggactttcatggactctgttaaattctgcattggttgctgatttgcagttctagtttgcaacttatttacatagtttagtcactatatcatctgatattccaacaattagcaggagttcactgttggattaaataagagattaaaatgtgtaaaccggtcaggtgcagcagctcacacctgtaattccagcactttgggaggctgaggcggaaggattgcttgcgcctaggagttcaagaccagcctgggcgacattgtgagacctgtctctacaaaaaaaaaaaaaaaaaaaaaaagtcaataaatgaggtggcaagattgcttgagcctagggggtcgaggttgcagtaagctgtgatcacgccactgcactctcatctgggtgacagaacaagaccctgcctttaaaaaaaaaaaaaaaaagtgttaacattgcagatgtccagttaataggaaaggcctctgtttcacttttcccat

SEQ ID NO: 69855 - DNA, 1019 bp, Homo sapiens
gtgcgttgcaggttgctggggctaccatgacagtgactgcacatgattggttttctgtctacgaagctcccagaaaacctggacatttctggagttccccctccctttcagtgtacttgtatagcacctgtgcaggagagcaccacacccctaacctcggtgacataaattctcactgaatgtagagacagaaggaaaggggacggcagagaaagcttgtctgtgagccttggtcacaagacctcagactgcagagacatgcaattacttttcttctgtcctttgtgtttccaaaagcaccatattttatttgataaaaggtacaggggaccattctgcttttgtgatgttgttttccaaatcaagcatcaggctctctggtctgagtaatgctttttgtgctgagtattaagtttgagacagtctaaacaattcctttgggggtactgaaatactttaaattttgcatcatttttgctagttataaaaataataaaagagtttcaacacattccatttgttctaagcactgttggattaaataaaattctggtcagcctgaagaacgtgggctatttcttgtgctatatataaaggtatgtggtctttactatttcacattaacctgttgctagaggttttcacaaatgtatcaattcacaaaagaacctcagagaaaagaatgtgaaatatgctaggaatttttgttaaccttggcttgatttttagaagttaaattttaaaatgttttagctttagaaggttcttttttcatttcttagtaaacatagtcattttcttggtgttttctaattttttaagttttaattgatgaaatcttaacatcttttagaacctaactgtaaaggtgtagttacaatttacaatttatagcatcaacttaatcttactatttcagttactgtattattccatttgcattactctaaggaatacctgagactgggaaatttataaagaaagaggttgaattgacttatggttctgcaaggtgtaca

SEQ ID NO: 69856 - DNA, 836 bp, Homo sapiens
ggcgtaagccaccgtgcccggccttgttttaatctttattgaagtataatagacatgtgataaacagcacatatttaaagtgcacaatttgttaaggtttgacctatatgcacacacacatacacacacacacatgcacacacacacacccattaaaccatcaccacaatcaagatgaacatatatgtcactccccccacattccctcaattcccctttaaaatccctccctccctttcctggcttccctgccaaacaccagacaactactgatctgctttctcctactgtagacaagtttgcattttatagaatttaacacgaatggaatcatgcagtatatactgcttattctggcctctttgacgcagcataattattttgagatacattcatgtggattgtgtataacagtagttcatttctttttattactttttaagaaaagagaacgctgctttttttactctgaacttgggccaggatgattgaagttacctacgaattgtacattaaccaactaatggcagtgaagagttaatctgtaacttcatctgttagctgttaacgtgacccccaaacctaacctcctcttgactgtcagatcctgatcccagacacactttctctaaaggctaaaactgaagtaggactggagacttggggagcctggtatttctgagtcttggttggtccctgcccatcactggatcttggtgtagcatggtctcatgatagtgtgagaacagggttaggtatgtgactgtgtgaccagcagtactctgttaaaaaccttgactttaaattacttcatgaagtttcagatgggggaaaaa

SEQ ID NO: 69857 - DNA, 712 bp, Homo sapiens
ctcatcgtccacccccctcccacctccaacaaattggtttttaaaaaattctttccttaaatgcttggcttcaaatttcctggtacaggaattctgtaattctgataaaaaattgcttgaaataatacacaaaatgtctatgtgtttactaatagatcctgattaaagttattattgagaaactaacattggagtcctctaaattctgatttcccagaaaacaaaaaatcttcaatattataaaacttaatggactctacagaagtcggggcagggttgacaggaagcagttggctctgatggaacaccctcccccgctgccagcacactctgacctcaggaaagtcatgcctcctttgcaaatcttggacatgggactaggtgtgctttcatcccactccaggactgagggacacttgattcagatagaccatagtcaaggtccatgttgcctaagagaccctctttgtcccccagcatgaggactgcagtgactttcaagtggctcccaggagtggagaagcaggctgcttcccttgcatgggatccattaactcccaggcatggagaagcaggctcagttccctacggtgggctatattagctcccacaaatggagaagcaggctcagtctctccttgggtgtgctgcattgtctcccaggaatagagaagtaggatcagtcatttattccatgtggggctgtctggcc

SEQ ID NO: 69858 - DNA, 3502 bp, Homo sapiens
agagagagcctgcccgccgcctctcatcctccagagaggctgtagggtgtccagactttgcaggcactgttgttcctcgttaagcctgatgctgccacctaattaacacttgtttatattaattagttgccatatgcattgaaggggagtggtcctttttgaagtttctagttgctgactatataagatttggcctgaagtgggacttctggaaactcaaccaagataacgacttccaggttcttccaaaagcttatcttccaggcataggcaggtaatgaaacaacccaactgcggttttttccataacatctttcaccccacagtatcgatggagcaggagggtgtggacaggctttcctgggtttttggtgctccttgtcaggtgttaaaacaaagaggatcattgtgtttcttggaactggcctaaacgtctatgtttaagattaagatctagggaaatgcatttccgtttgacacccactagtttctgattgtgaaaagggtaccaacctgtgcaatggcgccgcgacccggccgcggactccagcctctaaagtcgggtacctttaattaggagaaattaagtggggctgctacatattttgagaataagtaacactatttaaacttaggcagccttaaccactaacttaaccgctgaattctcgctgctacatgtctcctaaatagatcagcataatcttaactaggacttaaaatgcatcatcttcgttccggaactcagaacctgcagccgacgggagcctttggaggcttaatgactttaattatggcgagaaatatcttctcccggtggggaggggcgcggccggtggcgaggagggcactttcccgggtcggagaaggccggatggcagcccgccccgaaagtcccggcccgctggattgggggttcgggggtggggggaacatagagaagcagggctggtggaggggaggagggaccctgcagggcggtacacgacgggtgggagtggggaggaggagggctcctggcgcggggaggagccgcgggaggggggatgttggccgcagggcctcggagttctgagctgtgtttgtggcttcagcgctttgatctcctgccagggaaacctggaaggtcaggccgggctgcagccaagccctggagcgaggagccggcgggtggagctggcagcactgcgccacccaccctcacctcccaaccccccaagcagtgaagcccgcctggccgccctggcctctcgcccccgctcctgccgctgcccctgcccctgcccctctttacctcctgtgtgttggtctcctgtaggccgtagattaaggggctccaagtcttgaaagtaagctagccaaatgccctgcaagtttggcttagtaaaatcatgtatgttgtatatactttaaaagaaaccagatatttttttaaagctgtgtgcgtccctttcctccaccctcctcatccccaccctagtacaaattacccaagaaccacaggtgattccccctgctggttcgtgagtgttagggtctagtttgcctctcctcttctaccaccaccaccacccccgttcctggcaccaggattttctcaccggttacccgtgtgctcttggtgtgtgacctcatttcctatggaatgaaaagtttctgtcggaaaacagggcccttggtgaggcaggccttgggagcccccttgcccagcgagaatgtcctgtgtcatgcagtgactcatgcttcagagaacagcagctgaccagaatgttcaagagcctggtgcctgggtggtcactactaagtgaagaactcgaggaggaggaaaggaaaaagtgaggagtaaggatttaaaatccacttagtggcctccagagggagggggataacaggactcaaagagcctgggctctctggcctggggtaggacccgccaagagggacctgtgggcgtcaggcgtggccagtccctaggaccggctgggtgctctccatcgtgttaaccgcccttttcccctccctgaccacaggagcaggcctggtggcggcaacagaaacagggctggttcctgccgccctgcatttcagcagtgacgtgttccaggctccggctttagatggctgtgtctctcaagccttcaagcctatgcttaagtctcttgttaccccaaattagggcaccattgagttggggattttgaagctgtggtagaatttgccaccagttcacccagagagccaaggcgccagagcttcgcaccaggtggggaaagcagccaaacctgcactttcctggggttgggccgctgtatggtgtggccatatttctccgcaggttgcaggatgaactccatcagtcttttaggctggaggaaaggcaaggccccctagtgataatgggaggaggctgtaaaaattcacatacagcctgttcttgtggacatggccaagggtagtcatctggccagctttcttttggtaaaggtactaagggaggctcccattcctgcagaatggatggaacaaacactgcaagtggttgggcttgttttcagagagctttgatatccagagatgagcacacgcaggggctggggcctgatacagatccacaacaaggccaagccacttttagtgcctggggtcaaggttggccggaggagacacgatgtctgcattcgaactgacaaccagtaaaaaggctgtcaggaaatgcaacagcagaagatggcaccagtaataagaaaccgaatcctgagaatcttaaagtgcgaagaatattatgttccaagaaaatttggtagagaacagacctttctaaaaagtcaaagggaggagataggtggcctagagtgagctgcaatcagtgctttcagtagcagggcccatggtgtttgatgctaacccctagggcaaaagctgatcttttaggttaatcaacaaacattttttggccatttaccctgtgccaggccttttgccgggttctgggaattcagcaggaaagaagtctgacacactggctgccctttagtgaaggaggcattttaagtaaacaatgacagtgtgatgtcataagtgccacagtggtggagcacagcataaggccactgggcaccgcagcctgagggaataatacctgaacagagagagaagcagtaaatgaaccctgtggcagggggtgggtaatgtgctcctcattgttggtctcctgttaccccacatgtggccaccattgagtttgggattttgaagagaactaaaagaagctcagtctaggccgggtgtggtggctcaggcctgtaatcccagcactttgggaggccaaggagggtggatcacctgaggccaggagttcaagaccagcctggccaacatggcgaaaccctgtctctactaaaagtagaaaaaattagccgggcatgatggtgcacacctgtaatcccaactactcgggaggctaaggcaggataatcgcttgaacccaggaggtggaggctgc

SEQ ID NO: 69859 - DNA, 1124 bp, Homo sapiens
ccatacacaacatagccggttacatgcagcttccactttgcaaagctctattcccattggccaaatggaggtcccagataaggtggctgtgaggttttaggaggcagtgaggaaaaggtaagaactaaaactagagggagtttgctgaactgacttgttggcttctttttaaagggaaaaaaaaaagcgctttggtaaatatgactcattgtagtggaagctgatatttgtggaagcagcatacaattttctgagttgttgtaaaccattaattatacggttagtaatcactgttccctcaaaacatgacactcactcttttgtcctataaatgtgattatttgtgttgatttggaagggcctttcttaccagttacagccaactttgcagtattccacaggctttaccaacagagttcccttggctcttggggggcctggctgagatcgccacaggcgtccccctgggccacaccaaaggcactacatgggcctagggagcacaccatgtgcatgtgagcagaaccccaggagtttcctgcaaattgaggggaaactcatcccggtcaccccatctttatcctgacaaagccaagatagcccatgtgccgcttaccaggctggagagaggctgtgactcactgtgtctgtgttccgttccagcaacccactgaatactttgacatggggattttcctggctttcttcgtcgtggtctccttggtctgcctcatcctccttgtcaaaatcaagctgaagcagcgacgcagtcaggtagtgcctctgtgtgtagcccgtgagcagtaacccctcttgccgtgacactggggaaaaccaggactctcgtcaccttattttttgatggtgcaacatggagcctcacagctgtggactctgagctctgcagcctgttcccagtggcctagaaactgcaaagatggaaaaaaaataagagcaaactaggccaggcaccatgactcacgcttgtaatcccagcactttgggaggccgaggcaggcagatcacttgagctcacgagttcaagaccagcctagtcaacatggcaaaaccccgtctctaccaaaaatacaaaaattagctgggcatggtggcatgtacgtgta

SEQ ID NO: 69860 - DNA, 2002 bp, Homo sapiens
taggcattcttatttagtgcaagcgctctgaggagtagcagctattatcacctccatttaacagatgaggaaattgaggtaagagctatttttcctttaaacctgtccaaggtgttacatgtgaccaagtgggatgtgaactctccaaagcattctttttttaaccattacgatgagctaagcaagggaaaacagtttgcaaactgctgttgtaattattaccgctgtagctgagctcgcgcgtgggtcacgacctaagtgagggtggagcaggggtcactgggagcccggcctatttcagcccggccaaaccgcttggtgacttggaggccgggccgaggccccgcccctcacctgctgatcctacccttggatgggacaaacagagggccctgctgggccggcccaggtgaggcgagagatgggcggggcctgatgcgtgagtggcaggagcagcgcgcggccggggcggggcgtgcgtgcgcagtgggctccgccccccgggcctctccgcggatccgggcgggccccaggctgcaggggcggtggcggcgctgagctgggcgggccggggcggggcggccgggcggccggggcggggctacactcgggccccgcgtcctgctcccatggccgcccccggctccccgcgctgccccctttaccccgggccgcgccccggggccccgcactgacggcccatggcgccgccagccgcccgcctcgccctgctctccgccgcggcgctcacgctggcggcccggcccgcgcctagccccggcctcggccccggacccggtgagtgtgagcgaccccccgccgcccgccctgagcggagcccactcgaggggcgacaagggccggccggcctgagagccccctccctcccgcttcaggaccttccgggccccttcccctcgcccctaggcgacgcccctcaggccgggatggtcccttcctgggacccgggctacccccaggcccgtcatcgacgcccccgggcccggtactgtcccccggctgcaggacccggtgctcctcagcgacgcccctcagcccaggaggccctctccgccttgagtcttccaagaccctctgcgacgccccccgggctgggacatcttctctgtctcgggatctgggacccgctgcccgagtccctcagcgaccccaaccaggccgggacgccccctctccccggtacctcctgggatcccgtcccaagtccccagcgacttcccccgggccgggacgtcctctgctccccggtacctcctaggatcccgtcccaaaatccccagcgactccccacgggccaggaggccccctgctccccggtacctcctgggatcccgtccccaagtccccagcgacccctcccgggccgggacgacccctgctccccagtacctcctgggatcccgccccaagtccttcatcgacgcaccttgcaccgggacgactcccccgctacaagaggctatacgcccctctccgagacctccagcgacatccctcccctgggccaaggtcccctccctgagcctcactgcgacgcccccgcgtcccccagtcctctcctcccgcctacaccggtggaacccggcgcctccccgcgcagagcagagcggaggcgggaggagccggcgctcagccccttttcccgagtcctcggctgcacccgcttggcggacattataacttctgcctcgcgaggaacgggatggacttgttcgccctgctagaggcaggttagggtcctgggacgaccttgtacccagacggacgggacgtgccctctctctccgctgggccgctttgaacttccctatgactcaggtgatggcgcagaagggggagagaaaaaaggaagcagtgatgggaaacttctccccaactgagtttagggtgctcttcctgagggtgcaacgccgagctccgtgttttgggtcagcccacaccttagacaggtcactcactacccaggccaaggccaaggcca

SEQ ID NO: 69861 - DNA, 644 bp, Homo sapiens
atcaaattcctcctgtgtgcccagcatctctgattaggacttatccctgtgccaattgacagaaggctacaactttgttgcttcgagttttactttgaaatgtgctctagagatatatggtctacctggtatcagctccccactcaggagctcttatattatttgtctatcccatatcagccaagggaaactgaaaagcccagagtctggcttccatggagtattggctgccctccaggactctattattggggaattttcttgccatctgacattaaaaataggtcacaggcattactaacaaaacttgtctagaagctggattatatccagttgaccttcagacaacatggaaaaaggttgctcaagtgatagtgaggcaaggcgtagatttgagctgggtgcctcctgcttaaagcaaactaagaatataaaattcatatttttattttattttattttattttattttttagatggagtctcgctctgttgcccaggctggggggcagtggcactcctggcctcaagtaatcctcccaccttggcctcccaaagtactgggattacaagggtgagccactgcacccagcccccatccatttcctttaaatagcagagtccctggtttaaatagcaaatat

SEQ ID NO: 69862 - DNA, 1962 bp, Homo sapiens
ggtgcactgaagtgaattaattataacaacaattattgctatttactgagtgcttgtcatgtgctagacttgatgccaagtgcttttgtgaattttatgttatttaatccttgtagcaatcctgttgataagaaaactgtggatcaaaagatgaagtaatttgtctatgctagtaagtgccagagccaggattcaaaccctggtttgccacatttgaaatttttctattttcagcagctagaatcccttttattaacaatagtaaaaatagatcataataacggatccagttttatgctttaaagttatatgaacaaagtatgcccagttctgattattcccacattggccccttgtgcagctctccagaagctgcccttcctggcttgcatttgctcaaggactaagaaggctggcattctgagaggctgctcacgccatcctccagaggcccagatgcctgtggtctacaggacccctgacagcagccagttctgtaactcacaccccattgctctgctgagaaaggtacaaaatgcagcactgtataaataatctctaaaggtgcatctagaggccggcacaggggtgcacacctgtaattctaggctggaggctgaggcaggagaatcgcttcaacccgggaggtggaggttgcagtgagccgagatcacaccactgtactccagcctgggcgacagagtgagactccatctaaaaaaaaaaaggtccatctagtagagagtaaaatagtttgaacagctcaagtaccgcctcatggaaatccttatgactcattgaacaaggctgagcactttggaaatggtgaccacagactgtcccatgatttaggagggtgaagatgtctccctaaagatattggagaagttagatggtgagaaacgaccaggttacagtctgtctcccagaacatgaggccctgctaccagtgtggctcgcatgtgggtctcagtcagagtgtcagcgacatcttcctgtcctctgctgattagaggaacacccaggctcctctgcagtagaagtactcaggctgtgtttgctctttggcagacagacgacggggctagtgggggtggagggtgaggggcagctggcagaagctgtctgctcagtcatcactgccacatcaagtaatttgtcacagactctctggctgatttttcagcaagctcatggacttggagaggtcacagaggtgagctgtgtactgtgggcaagcacaacactgacgggggcttcatagcctctgctacccctagggattataatttattgaattaacataaccaaacagaagaacatgtaggccagagtcaacagtgggttacaggaactacccaggctagcctgttgggactcccttggcttctaggccctgaagggaggggtcagtcatctggattggaccttattttgtagcattagttgaacatttatcattgacaggagcctgtgctattcactttacatgcgttgtctcccttaattctcacagtactgtgaagcaggtactgttatgcttattttacagatgagaaaactgaggctcataaaagttcagtaatctgcccaaggtcccacagataaagatcctgccttcatggaacctttattttagtgggaagggaagagattaattgtgaaagtgattggtctaaggatgggtaggatctggctcctgggactgtgttagcaattgcatttcatagactctaagatgcctcaattctgaggtgcaacattattttatacaccattaagggaaaaagtatttccagtttaacaatgacatgcattgactaaaagatacatcccagtttaaaagattaaagtgtatcccttagagttgatgaaatatggtaccagccttctttcttgggtgccaagaaagagtagaatctttccatcctgagtggaatctgattcatggctgggacccat

SEQ ID NO: 69863 - DNA, 1126 bp, Homo sapiens
tcttgggagatttgcacacttcacctcccggggaccctcaacagcccagttcacagatagggtgactgaggcccagtgaggtggagtggagtgcccagaggcacacggccatggggatggggttcagaactcaccacgcagtggggaggggtctggcaggttctgacatggggtagaggagtacccagtgaagccgggaagaaaccgggtggctagagggagagctgagacgccccatgccaaacacccctgcggagaggcagccacaagggccagtgtgggaggctggagcgggtggacagacgtttgaaggggagccaggaacagcaccctcttgtccctggtgggagggagaggggaaggcaggtggggccgaggggcaggagagccagccaggaggggcagctgccaaggagaccacagaggagctgtggaggggagggccgaatccccagggcatgggggccgcctgggcccaggcagagcctccccagacaaaggccattctgtccctggctcccctcccaagggcagaccttcctggtctctggggccttcaaggagttggtgagggagaggacaggtggggacagcacccatgcccttgaatctagctgctggaggccgtgagtccaggagccaggccaagggctgggggctctgctgatgctaaggcaggggcatgagccaggcaatggagccaggccagctccctctgtggggccttcaggtcccagcgtgggtatgggatatctgaggcttcctaggctgggccagctctgccacacaccagctgcatggccttgggccggggacttcccgtgcttgtgcaagtcattgtgcaagggccctgggcttgggggtgctgcactccaggcagcattcttctcatgcccactcggagggaaaggcaccatcactaaaaggcaccaagctgctgtgtgtgcctgcagcagccccggctcgtccacattcagcctcagtgtcctcacccgggaaatgggcaggatgataagagtctgcctccctgggtattgctaggatgaaatgttggagcctatggaggaaagggaggtgggtgagtggatgcatccactattctagaaaactctgctggggtcctagg

SEQ ID NO: 69864 - DNA, 1168 bp, Homo sapiens
acatgtccctgcccttctggagcttccatgctgctgggagcagggctgggcagaggagaagcagcaatgcttgccccatgtgaccagggtttctatgaggggttttgggggtttgggagccccaaggaaggaagactcagcctggacgaggtggagaactaggtgctgtgctcatccccctgttagactaccaggcagcctaggcctgtggactccggggccctctctcatgcccactgctccaggctgccttgtcctgtcgctcaaggccaccctgggcctccttgcctcctgtatacccacaaatccgtgtgattccattgcaggtccacagggccccccagggagccctggccgggctggagctgtgggcacccctggagagaggggacctcctgggccaccagggcctcctggcccccctgggcccccagcccctgttgggccaccccatgcccggatctcccagcatggtgagtccccctgggatcccagcaggtggaggtgggggtggagtagccatcagcacagtgcccgctaccatctgccacgtgccttctgtgtgccagccctgctcacgataggccacatgtgacccagtcctccagcaggcgccgttgtcctcctgtggttacaggtgaggaacactgaggaccagagagggaaggtggcttgccagggtcccacagcctgggcgtaggggaacggcttcaaacccaggctgcctccagaacctgtgcttagagccaccgggcatcaggccctcccaagccttggaactggctggaatccagttctcggaacactgggacgcaaaagacccggcggcaggaagtgagtcctgaactcccaaggccacaggcccggcccctcctccaggccctgacgtgcgtccttggcttcttccctttggcagcccagcctgacctgcccatgggctgccaggggtcagagtgtggagcgccaggtttcagcctcttctccactgtgtttttggtgcacaacccagcacaccattcattcattctgccatcccagcattcattccatctcactatccatacgatggggacaatgacagtgccagcctcccagagctgcgtaacatccatgtacagaagcctggcacacagtaggtggtggataaatggtatcttttattgtcatt

SEQ ID NO: 69865 - DNA, 1219 bp, Homo sapiens
ctgtcccttcatgagaatccccggcaggatgccctggccaccctagaccagtccttgaacccagaaccacctgtgggctccccgcaagaggtagcagggcccctgcccacccaccttcctgcccctcttctacctgcacttctgcccctgcttgctgcttgcctgggaggggacccactgggctgggggctgcatgaagctttgggggctgggggaacagctctgttggggacaggtgggaatgaggttcagtgctggcaaggtccccgagggctcctatgtacacttcaccaaccaactcccttagtgcagcttgcagatgcgttctggctgtggcccagcagtgacacctggtggtcatgatagtgcactgcaggaactggagtgactgtgctgggcctgcccacctggatcaaagctctcaccccttattcagacagggaaactgaggcccgactcggcagagagaatccttggcagagcgggaactggagccctgacttttaagttcctagggccagagaaccagctaccattccccaagcatctcctccataggcaccagacctggagctgggcactgtttacacagatgcaattcagacacagtccccaccctcagggtggtcacagtgaggtgagggaaaaaagacctataatcagcagctacaggactgtcaactttataaacactttacactttagcatcctcccggaggagccaggtgaagcctgaaaggtgcattaaccaggcacggagtgtccaggcagaggcgagggtacaacaggtgcaaaggccctgtggcaagagggagcctcggatatttgaggagctgcaaatacttggagtggcactgtgacaggtagagagtggaacagaggccaaagaggccttcagggtgtaggaggccacgttcaggaatttggactttgttctagggcagtggggaggcattgaaggctctagaagcagcagagtgatgcggtcaggttttttttatttgcaaagaatccctctgattgccatggcgaatggatgggagaagcagaaagacagtaggtcgggggctgtcgtggtcatcctggtgagagactgagccgggcagtgggtgggagccagtgaggacagacagccgtcgatggagcaaaaagacacttgtgtgctggtctggctgcaaaagggagtgaggagtcaagggagacttaaaatagcaaaaga

SEQ ID NO: 69866 - DNA, 3788 bp, Homo sapiens
cttttcctcagagtatgatgaaataaaaaggaataggctaaggcaggccctggcccacaactcttcctccataaaccatagcaatccgcactaatcatggcaggcgtctgtagccaccaactggcccatcgagaaggcctcaatatggaggtggctgctccagcctagctggtcccagctttggccctcaaacatggcctttccctgcccaccaaagcaaggccttctcccccgtgctgttctcttgcatccagcctgtcctccagggcctgtaggtcttcacccctggtcaggcctctcggtcccaggactcccactgagctgattcagggcaggaagcaggatcccagagagacaagaaggctgcctaatttgctcccctgccaagcgccttctccacatctaccagtttcctgcaggaaaaatgtggaaagctcctctgcctgcattgtccttccctccattttgccagcaggcaaactcctatttcacccttggaagcccagctcaaatatcccttcccctcctctggccccctaacatcatggatcttatccttaggagcacagcttggccagtctgtctccctaggcaggtggtctgagctcatggctcctctgatccaaccccacattccccagggtattcacagcacacagccagtgctttatatatgttcactgaaaaaaggacactagcttggctcctggtcctgccgagggatttgaaggtgaaccctgcccttcgcggacccgggcatccacctagggggctggggctagaggtccaggaaggtgggcagggtcagccttgcctggaggcagggtttggggccaaggcacccaccgtaaacctcctcctgcatcgacacctcacaaccattccccagctctgggcaccttagcaagggtgaagggcttacccgtggacactcggaactgggacttgagccccctggacctcactttcttcaatctatgaaacggggcagtgcaccaccaggccctgcctaccttactgggaagccgggagggcagaatggaaagacaaggacggagattcttccggtggcggatagagtagggggtcccaggatctgtctggttcgaactcagctggtgactttgcagagatactcaatttccttgggcctcagtttccccttctgtagaaacaaggatatcggatgagggatgattaaagggcctgctccacctcgaccgttaccggggatagggtctcggggccaggcacggcgttcgaggcctcccacccagccgaccggccttggggacccttccccgctggcccgggccacgcgtcccgggtactcactgcagagcgcgcccggcaaccccgaaaggccggtcggggaccccggctgggagtcaggactctagctcccgggcgcgacccgagaaccctgaatccattccgcgcacacccggccgcgtgacccctgccgaccggctggcgcgccacccattccccgcggcccgcggattagtcagcagttgttctagtccgggtcccttcccccagccctcccgccgatctccgtctccctgcagggccgactcttcagcgaccgtccctagagccagcggacggaaccattccaaacagcctagtctcgtgctgagagcctctccggtttcacgctgagacccgctcacccccgctctggccccttagatgctattttggcccgagtgtcacgtcgggcgctctttagagaggactgggacaagagttgcggacgcgaagaacgagtaagcggtggttcatccctcctgaccccacccccgtggcctggcccgatggtcgcgcccggggttgcgagatttgcgcctgcgcagtgcggcgcctagagggaaagcgagagggagacggacgttgagagaacgaggaggaaggagagaaaatggcgtccacgggtgagtatggtggaactgcggtcgcgccggcggtagccggaacgcccaaactgggggtcgttcgtctctgggcttggctgggaagactgagtggagttgccgagagggggttgaggcacccgccgcggcccgacgagctcggggatccgcattcctctcccctcccccaaccgggcgggccggttctggaatcttccggcgcccgtggcgcgcggggggcttgctgcggcgggggcgcgcggggcccgccttggcctccattgtgtggcggtcctcgcgccctgagctccgggcctcccgccacgtgggcggggcctgcggccttcgaggccctgcgtgaaggggaggatttggccaggcctcaagccggtcactatgaaaccgccggggggcccgcaggctgctgtccctgtgaggcctccctccccgttttcagggtttcctgagaaaccaggggaaaaagcaaataaagataccgtggatttgtgggccgaggggtgccggcctatgagcgggagccccgtcatccttaagacccagtcggctggggcgtctggcgctgccgagctgccccctctgtggcttccagccccaagccgaacttctgctcgcctgggctttagacagaatgtgcttccctcctccagggcccccagtttgccgctttcttgggcttctccatttttatcgttattaatccacgtcctcccctcccccaaaaccaattaagtggcttcccagggccctttttctgcaaacgccgagggacatccgttgtataataaggccagcctgggtcgagagacgagaaacgctaccagaaagatatttctggtctctctgacctaggaggaacaaaaggccgagccttcatttgaattatgtttcagcagtggcctcgcacgtttattcgcctgcgttaggccggcaggcctgttgatttcgtaggtcgacagaggagaggggaaaaaaggccagtagaagcaatcttaaaggcacttgcaagcaagccccggttgggaactccaaaatgggagtagagtggtccttgatggaaggagcgtttaagagtgtcgcctagccatcacctgcagttcgcaatctgtgggtacactaacccgcgaaaattggcagggtggagcatttttgccccgggggtattctcaggccacctggttccaggccttagagacagtgggagaagatgagaaggaagacaggaaaagttctgggcactccagagtttttggagtccagaatccagcaacttaaggacagtttaagaattctccccatctgtggtcaataaacaggtaagtgttggctgttcgtgccgggataccaaagagtggataccaaagagtgccggtagaagagaggactgaaataccacagctaacctcccggtgggaagtggtttcctaggtgccctatccaccctcttctgctctgcaaaagcctgaaaaggcaaaacgtgtgcgttgacatttttgcgtggctggacgtgccttttttcagtcaactttgttcaaaccttgttcaccagtaactaccatgtgctgtactgtattagaattacagttgtggtttctgttgacacaaagtaaacacattaggcctggctgggggggccttcagagagtcacataagtaatctggtccttagtttcctttcctgtaaaatacagaagttaggctagacctcttaagcttttgagcccttctgaccttccagcataagcattccacaaatttgtcctatgctgacttcagctcaggtactgtgaagctcaactcaggtagtgtgaagcagcttccatagtgactgctctaaagtgttaaaccgttgcc

SEQ ID NO: 69867 - DNA, 1942 bp, Homo sapiens
tctctgggatgcctgtgaatgcctggcaccaagaggcctggctcacaggtgctcaaccaatgctgctgatccgtggatgagggcgtccccataatcgtcatgttcaaatcctggctccaccagctgctctcctgactgtgccccagttgggcatgagtgtccttcacagaggtgacacaccagttcattcaggtcaagggcgcagagcagtcctggcagcacacagtaggagatttattggagctctgagcctggctgtggttggcggcttccctgcaggcctgccccacccgtgtagcatggctgccgcccagacccgcccgacgtcccgcccagcccagccggcagcagcagggggcaggatttcccgctgatcccggcggtccgtcctctgcagtttaaaaagagcccagcggggcttaaccctcccgcgtccggccggcctccgatgccccccgtcccctgttctgtgcggaactccggctttggccatctgcctacttctctgagcttcagtatcctcatctgtaaaaccggttcccctcatttcagggtcaaaaatgagcattcagtgagcacaaggagccctcagtcgccaggggcatcctccccctccccgcggcggtgccgtttatctggccaggggaggtccacccgggaggaggtgactttgcagcctccagccgctatcgcttcctgccttcatcttgggaacaggccgtgctgtgcgccagcccggggagcccaccgtctggggaggggggcgattaaaaggtcccaacctcctccccaggagaccaaagaggttggacggggccccgggtactaggctgggtgggggttgggcgcctgggccggtcgcagttgtctgggggccctggggctctctgcgtcgagagcgctcgaagacccgggattcctggcccgatcgcgggcggggggagaccccagctccaccccagctcccgccggctcggggaaggggcggcccctttaagagcgcgcggccccgcccgccccctccgggcaggatccgaattccagggaggcggggcggagacggcggcgaggaggaggccgcggcgcgggacgcatagagctgcggctcgggcggcgcctccctgcggcggcccggcccggctccggcccccgctggggcaatgctccccggggccgcgggatgagccaggtgagcgcggagacccccagcactccctgcctggtgcgcatggacgggggtggggaggcggggcgggaagcggcgtcctcggcctctgttccccggggctgtgtgaccttgggcggccccgcaccctctctgggcccagagccccagcaccggcagggcctgcggaggccgctctgagtcctggccccgcaggcaccggcctggagcgctggggaggcttcttggaggaggcggggcctggccctggccccggatcgccgagaccggccacgctgcgccgcctggacgccgggctcctccacccacagctctgcgaccttcacgagctcgaccctttctgcgcctcagtttcctcatctataaaatggagataatgcctccgcgcgctgagcccgagcgcggtcgtgctgttacactattgctgctgctatgtcgttaatgacggcacagcccttatggaaggggggccaaggaaggcacggggaccttcccgcaggacatggggtgggcaccagccctaagccatgcacataacccactctgaggtcaggacctgggttcctttcgtgtccactgggggccttagccgttgtcttcacttctctaggtcccagcccttcacaatgggcgcgcctccctgcctgagagggaggccccagccaagccccagtttccaccgcaaaaagccacacagcaaacacttaatggaccctaaatttataaaaattatcccatagagtcctatgaggcagg

SEQ ID NO: 69868 - DNA, 779 bp, Homo sapiens
gttgcagtgagctgagatcgcaccattgcactccagcctgtgtgacaagagcaaaactctgtctcaaaaaaaaaaaaaaaaaaagatgaacacacaagcctagtgccagcttgccaaaggccagctccaggcttatttttcctggcagctctgcagtgcctggcaagggctggcacccacagggttacaggagtctttgctgttctctgtcccttagtcctgctttgtatgcctgtgatattgggcttctggtgagtacgagttggcctcatgccttggtgcagctaatccaggtagtaagtcaactgcacatgctgtacgttatgccgcgattctacgttcccgtggccctgctggccctgacaccccacgcatgaaggcaggtgcacaggtggttctcacgctctgtggggaccatcatataggggtctggagcagaggctttagtgtcacttgctttcacttccagactctgtcaccagctatgtgaccttaggcaaaagcactaggatttctcaaccacgaaataggaggaagagccacaaagggctgctgggaggaggacgtgctggcggtggctgtggaatgctgtgctgtccctacaaggaagtgtgcggctactagtgtccgagttgctgtctgctgtgggcctctcagtgcccagaccctgccaggggctccagtcaccaccactgcaggtgcagctggcatatggtggggaaagccagctcagggggtggggaggtgctggctcatggctccctagtcatgacagagct

SEQ ID NO: 69869 - DNA, 383 bp, Homo sapiens
gtaaagaagcattgtgtattctgctcactacagaacagctatcatcatcacagtcattatcaccactaccatcacacagggactcttgaaagagttcttcccagtccagtcagccggatgcctggaattattcatcactgtcagatctgctgtggttccagtcaggtatgcctcaggctgtattgccagagggaggtctggccaggtgcccagggccctggctcaacaatccgttccagttcctctcaacacgctcaacacactcaggccgttagcctgcatatttagggcagccttctgcaataatgccattgcccctgccatccagacaggatgggatggcaggacagggccagacgctgggctgatataccaccctggcc

SEQ ID NO: 69870 - DNA, 427 bp, Homo sapiens
taacatcttagatagtgataaacacaatggaggcaaaaaagaggagggaaggaggatagggaggggagaggggaggaagggaagttaaaatttaactagggtggccatagaaggcctccttgagaaggtgacaggtgacactgtctgcgaaagagcctgccaagcaaaagagatcgccagtgcaaaggtgagtatgtgcctggcatgtctgaggaacagaagggaagtgaatgtggctgagtgagcaatgaggaaaacagtgggtcaggaagtcacaggagaatgcagggggccttatgatcaagcgtgaggtctctggcttttactgagtgagctggagccactggagggttttgagcagaggagtcctgacatctgacctatattttaataagttctggctgctatgccttttgtttcccttgtg

SEQ ID NO: 69871 - DNA, 982 bp, Homo sapiens
tgcttgaggccaggggtttgagaccagcctgagcaatatagcaagactccatctctacaaaaaataaaaacaatttgccaggcacagtggcacccatctgtagtactagctacttgggaggctgaggcaggaggatcgttcaagcccaggagttggagcctgcagtgagctatgacagctccactgtactacagtctgggtaacaagccaagatcctgtctcgaaaaaagaaaaagagttggtgcttgcagaagtagcaagtagctgaggttgactggagcttgggaaaaggtgagtgtggagcaggagagatgacaaaagagagctaggcaggggtcagagtccaaagggccttgaatgccatgctaaggaatgtgagttttagcccgagggcaactaggagccactgatgaattttcaagcagaattttctttaaggattccccaactgctctgttgacattttttctcaggagtatttgttcctctccatgtgaagacataaagaacagaaaaatcacttctgggctgtgataatatcaacgatgtctcttaggcaaaaagacctgctgagaaaaagaaatgtctgcaaggcacagatgtcacctcaaccttcagaaacacagcgaagtgcaaaacccaagccatgtttgcttactgtcagcatgtcaggctttggtgccagacacgggaagttcctgggaagtagttaagacatgcaagagtttcagaggatgactagaaaaagatgcaagcccaagctcaaagccagaaggaccaacaaattgaacttgttctgaactacttttaggaagtgaaacaagaagggtggaaaaagtcctgcgtacattaaggtctctgtttgcagaaggaagtaacgctccagaagccaaggttggcagccttcctcagacacaggcccccagcaggcatcagtctgcctagagtcaaagcacccaaaaatcacaggccctgcacaaat

SEQ ID NO: 69872 - DNA, 1453 bp, Homo sapiens
gcctcccaagtagctgggattacaggcgtacgccaccatgtctggctaatttttgtatttttattggagacagggtttcaccatgttggtcaggctggtcttgaactcctgacctcacgatccacccgcctcagcttcccaaagtgctgggattacaggcgtgagccaccatgtctggctaaaagtcttaaatatcccctacaccccaaccttaactccagtctttcctttgtctctgtactttgcaggtctctgacagcctggcagaaaacctggccttgcctctactacccgaatgaccttacatgtgggatttaacctctctgtgcctcagggtcctcatcgataaaatagggatatttaatccccacaaaggttgctgtgaagtttaaatgtgtcattgtaaggaaagtgcttagcacagtgcccggtacacagaagggactcgatagccactagcaagcatctccctcgttattttgcagcattatcaccggtgtctccattcagttaacttgtcttagaggctccaacaaacaagaccaagccagtgcctagccggaggcgggcggcacgggaccgttttctagtttttttttctttcttctttttcaaccttggcaaagagataacgccctgaacaacgaggaggcctcaggatggccatggaggtgagtccgaaagaggaaatcagagcccgaagagttttccctcaggccagtggggaattcctcggggcctaagtcctgtctctccgggcggaagccccaggaggtgctgcgggtatggggcggccgaggaacaggccggcggccaagtgggcgcgaatgaatgaacgaaccctcagcccttcctcctcctctggctggggacgtcgctcgcgcccctgcagcgccgcgtcctcttcatgacctctgaccccgcaaacccctcacctaggacccctgacccctcgccccacttcttctcctggctcgcccgggtccccgcttcctcacccgcaggtcccaatagctcccggcgccccggctcggttcggcttggcaccaaaatgtccgcggcctccacctctcgctctcccggtgcgtccgggctgccggcggctcggagccccgcggctgtcacctgccgggcggaagtgagctgcccgcgcgcgggtacttccggtggacgcaaggcctgaaggcggggtcaagggtacaaccctggcgggggtggtgcccgtggggcggggcaagaaaaggggaagagcccaacggtattaacccctcggcagccgcggcgctgctatgctgcagtctcccgcagagcccttgggaaaccatcccgctagccaattcagcgtgagggggccgggcaaggtcgtagggagtttgaagtccatcttctgtgtaaagacggcaaatctgaggttctaagaggggcagggttttgctcaaggtcactcattttt

SEQ ID NO: 69873 - DNA, 650 bp, Homo sapiens
ttgttttagctccatttcatcttggggggaacttcaaccctgagaacttaaatagcatgtgagtgacaaggctgagggcctggtcccagagccccagctgtcatgagtttcattcattctcctaaaatataatcatcactgccatctgagccaggaacactggggatgcaacagtgaacagggtatggcacaatccccccttgggggctcactgttgagtatgggagaaagataaacaaagggacaattataactcagagtggtaggaagtaccagggaggcacaggggatgcaggcaccaaattcagcctgggaaagtcagggaagtcttcctggaggaagtgacacccaacctgaactgtgaagggtgagactactactaatagttaaccattaaccaggcactgtgtgaagcgcctctgcatattaactcattaaactttcccaataattccatgacagttccatgactgtccccaagtagagataaggaaaagaccagtgggtagaactgatttcttccctacttccatgagggcctggacctgctctcccacagcatgatctggcaggagagctaaaaatatactagtaagaggaagtacagttcaaagtaaaaggctggataattacagcttgcagaggtgggt

SEQ ID NO: 69874 - DNA, 781 bp, Homo sapiens
ggcctcagtttctcttctctgcgaactgtgcacccaccatgggccaagcatcgttgtatgcccttgacatccatcaattcatttaactctcaccgttctcaataggtagatgctaagataaccccattttacagatgaggccactgaagtcctgaaatgttgagggactttcccagcttcccaaagcagcaatgggcctagcggagagtcaaggccagggctgatgacggcaggcctcatgctttcttctccactcacccttacctgcttcatgaggtttcatccaatgccaggaaggttgagagttcgtgcggtctcgtgaaatgacccactgtgacccctgccactggcattctgtgaccctcagcaagtcccttcccctttctgatactcagaatctcagagcaaagtccttcccatcctccctccacaatgaatgggtgcataagtacatgaacaaattaagtattcttcccctctgcgcccactagagtgcgcacaggtgccactaaccgccaccgttcccttcaattgccatcctttcacaggggccgctgtgcctttctatatacattcccagcctttccgcactcttgttcctctgtgattactattcctctactccagtctctgtttgcttgctggtttttgttgttttcatcctgcaaatctctaaaagttgccacagagcctttctaaaaggaggcaggaggtggctttgtccatagcctcaggaacaccagcctccacctgcttgctgagggcaggcagcttcccatcc

SEQ ID NO: 69875 - DNA, 598 bp, Homo sapiens
caaaaaatttataaattagccagatgtggtaatgcacaccggtaccaggtcccagctactcaggaggttgaggcaggagaatcacttgaagtcgggcggcggaggttgcagtgagccgagatggtgccactgcactccagcctgagcaacagagcaagactccatctttaaaaaaaaaagcctcaattaaaaaaaaatagcttccataaatttaaaagaattgaaatcgtacaaagtacgttctctgatcacactagagtaaaagttaataactaatctgggaaagtcacaaatatgtgaaaaacaaacactcctaaataaccaatgggtcaaagatgaaatcagaggggaaatcagaatatttttagatgaacgaaaatgaagatataacatatgaaaacttacggtatgcaagtaaaacaatgcttagagggaaatttaaagttgtaaatgtctacatttaaaaagaagaatgaggccaggcacagtggctgacgcctgtaatcccagcactttgggaggccaaggctggaggatcacttgagcccaggagttcctgaccagcttggggaacatagtgagatcccgtcactacaaa

SEQ ID NO: 69876 - DNA, 1562 bp, Homo sapiens
cttccctccactattgtcctatgaccctgccaaatcccctctgcgagaaacacccaagaattatcaataaatactaaaacaaacaaacaaacaaatttttaataaacggtagtagaggtggtaagttgatctggcaaagcctacaaagaccggacctgaaaggcttaagtgtgggaaatcctgactttggcaacacagtagagtgcctggcacaccgaagagcacgatatatgtgagctgttaccatcaccaccacccccacccccatcaggctacattaccacaatcaagaggctccaacgtgaagcctgaggatgctgcagcgaacacttttcggatgaggtaacagcgcagcgccgagaggccggggaccgcgggtagtgagggaggagaagccgggtcagaccccagcccaggggcgccctttgggcgatcagcacctcagtcccggagcgcccagccccgccccatctcccagccccactgcccttgtcccctcctcacctcacagctccaagaacctggcaccgggagtaagccactgccggaggcggagcaaagcttgcccgcgcaccatagagaaccggaagtaaggaaggggcggccgaccggaagcgaggcgtagaggccggaagctcagcgcggaggcccccgagggaggtggtggcgtggtgagactgtaaaaacaaagacacatgcttctcgttcactgtgcccagggcctaagagagtgtccagcagctagtgggcgctccaccgagtagttgaattaatgttgtgttatgtccaagataacacgaaagaacctggtagcgcggcggggaagatttcggcgctagaggatttgcctgcataaccttacttcttaattattatttttaccataatatgccacgccagtgaaggcaacaagtcagggagggcattaacctcattttacacttggctttttgaggagtgcatcaccagtttctccattttaggcctgacttgcccaggacagagtcacaactctaacgcagtatttgaaagcttcaggtatttcctacccctggcatgaactgtacaaacaaggcccaggattttttcgtgtaaatcctcatctggagctagtaacacgtgtcctgaatccctggttgtacggggccagttccttctccttcccaggagcaaggaggaaaatactggctcttttttatttttatttttatttgagacagagttttgctctctcacccaggctgaagtgcagtggcgcaatccccgctcactgcaaactccgactccagggtttaaaggattctcctgcctcagcctcctaagtagctgggattacaggcatgcaccaccatgcccagctaatttttgtatttttagtagagacagggtttcaccatgttgcccaggctggtcttgaactcctgacctcactcaagtgatctgcccacctcggacttccaaaatgctgggattacaggcgtgagccactgcacccaaccagtactgactgttgagaatagctcaagaacacagtaccctccaggagggtagatctgccatgt

SEQ ID NO: 69877 - DNA, 1021 bp, Homo sapiens
aagacaattatcattagatgggtagtgcggtctgtgaagtttttggaccagaataagggaggctctaagccagggatctgtgatgtacttttcagttgcaggatctcactgattctatgcaatgatcttatagtattggtactattagtattcccattctcgcgaggataaaatggaaagaagcccagagagtttaagggacttgcccaaggccgcacagaaaatcagagggcagagttaagaacccagcgctctttccttgaaagccaatccccacctcaggttgggcactgagggacctgacctttggttttaatgtagaggggctgcttcccctggagggagatgggcagtgaggagagcagctcctactatttatcaaccaagacctttgctctagaaaggactagacagagtaatttattaacatcagcactgaccaagataaatatcagtcaaatagccagccctgaagaaagagattaggggctggaacactggaaacttcaggagctctgatgggctcccgtctcttcccactactctaatccttcctgcctgtgggcctcagtttccccatctgtcaaatgagcagggtggtggagcccatccctaaagctgttttctacaggtaaaatccaagaaggagcttgtcaaagatctcagaggagggtttgaactccaagccagcatccccaagggtacatctgcaagagtacaaatgtcactttctcagtgaaattacaatgttctcctacccttgacctccccaagccctctcttcctgctctctatcttgttccagagcacgttctaaaacgctatactaggattagcccagtggctcatgcctataatcccagcactttgggaggctgacgcaagagggaaggattgcttgaacccaggagttgtttttttttttttgttttgtttgagatggagtctcagtctgtcgtccaggctgtagtgcagtggcgtgatctgggctcactgcaacctccgcctcccaggttcaagc

SEQ ID NO: 69878 - DNA, 1733 bp, Homo sapiens
gattacaggcatgagccaccatacccgaccaaccacagcatctttaatcctcaacaaccctatgagatacatcctgattactcccattttacagatgaggaacccgaggcttaaagagtcctgaggtcaccccacctacaaagtctgagttagatctgttagtgccaggcaaactctaggcttttcccacggtgtcagctttatccctaattattgggcagtctaggtggggcgcttatgccactcctctttcccagctgtccaaaagccccactgctctgtgctgtaacatctcatggcaggcactatcagaactttgcagcttcattcctgggctgcagggcaggagggatggttgcttccttttcacaggttgggggagggggaacaggtggcctcacttctttggtaaatattccttgaccatacacagtcctgagccctctgagggtgggaggctggggaaacagagaaaaatgagatcatggtctagtgagagagacagacaagcaccaagtcataactgtgcagggtcatatatgcagagatgggggaagtacagggctgtggggaccaaggagtgaggggctgcccagggccagtcagggaggccaagccctagctcagcccagagcagggcccaaacaaaagcccaggctgagagcacatggcccagccagactcccactcccaggaggccaccagttgggtgcaaagtgcatggcgcattggcaggcctgggtcccagacctggtgctgccacggcacagcagggagggtgaccttggacaactcccattccctctcaggtccgtttccccacctgtacagttcgaggtggaggaacaaagggtctgtgcagccatggcccctggggatcccccactgctcccctgccatcatctctttcccacagaacttcccgacggaggagctgactaccagaagcccccagtgggtgttaaatcacaagctacgcctgggaatgggccactcctcctgtcttctgccctctcccactctccagggcccagtacctgcccttctcaccatctttcatcaggtccccatcacagcccggtcccaaccaggacaaagaccctacccatccctttctcacctcccccattctttgcccagacccctccctaggccttgatcctgccccgcctctaacccccagattccaagcgaggagtctcagcccctcccccacgacccagtccctggcccccgcgcctgcaccccaccccgcgcgcgtctatccctgcctggccgggctctcaccgcgccgcagctgcagacgcaacgtccccagcgcgaggccccgggccccccagcagccgccgcgccgtcacagagatgctgcacagccgcggagccatgttggagccgcaaaggttgcaggaaggccccgcccccaagccctggtggcggaggcggggcgcgaataaactccacccctccggctcgcccgccccctcactcacccggtcaggtgggcgtttcctgtgggcgtctccaactccgcaggtgctggacggaagtcagggttctaatcctctgcgcgctctgcgaccttggcaagccctttgcccactctgggcctcaggatccacctcggtaaaatgggagcgtggaacaataataccaagggttctttttttttttttttttttttttgagacggagtctcgctctgtcgcccaggctggagcgcagtggcgcgatct

SEQ ID NO: 69879 - DNA, 667 bp, Homo sapiens
aaaaaaaaaaaaaagaaaaaaagaaaaattccacaaatagagatttagacaatttccaattactatggaataaattaccccaaatcttagcagcttgaaacaatcagcatttatgatctcacacagttcctgagggtcaggaattctggagtgggtggttagctggggcggttccttctctgggggtctcacaaggctgtaatcaagatattggcttgggttagtagtcatctgaagacttgaccaaggctggagaatccccttccacggtgagtcattcacatgcctggcaagttagcgctggtagttggcaggagacctcagttccttgctacatgggcttctccagagggctgcttgagtgtcttcaccacatggcggctggcttcccccagagcaagtgatccagtaaggtgaaaccttcaaggacttttgtgatctgaccttggaagtcacactgtcgtttttgtacatcccattggttggacatggagccctcctctgcaggagtcagggtcttgttctgttgcccaggctggagtgcagtggcacaatcatagctcactgaagtctccaactcctgggctcaagcagtccccctgactcagcctcctgagtcactaggactgcaggcatgcgccatccatgctcagaatataaatatcaa

SEQ ID NO: 69880 - DNA, 1487 bp, Homo sapiens
atctggcgggaaagtgccagcaaacctaacaggcctccacaagtgtctttaaagtttcataggggtcggtatatgtgattaactgccaaagaagaatattcgccgtgtgtccgaaacgcagtcccctggggcgccacactcggagcctacttgaaccgaagagtccctccctgggccaacgaaggacccaattcccctcgccccggatccagcctctaagtggtttcccgggtaaggtcagcagaggtccgccgcctcaaccagtcttgttagagtaggcacaaaagcattcagagtgactgccactgtagccactcaacgccgagcctaggcctgctttttttgcagttagagtgaaactttccattggtggagtcaccccaaaggaggcgggacggagcgggaaagtcctgcctaccttggccttcccagccaatcgcagcatctatgcgtcagcctccggttcggttgcgctgcgcgtagtggtctgggcgacctgagggcggggccgggagcaggccccgggctgtggggagggtgcgcttcccgcgggcgcgcggagtgaggacggtgacagccacgcgcgcgcgtacgcgcccgatgcagcgcggccccgtgaccctagtcggccgctgagaggcgcgcggagtctgggccgctgccgtctaggggtcccgtcccgaggcgtccccggcatctccggcccgaatcccggagtgccgggtcgcgcctgcaccgaaggtcccggctcctgtgccctccctgcagccgtcagggcccgtcccccaactcccctttccgctcaggcagggtcctcgcggcccatgctggccgctggggacccgcgcagcccagaccgttcccgggccgggcagccggccaccatggtggccctgaggcctgtgcagcaactccaggggggctaaagggctcagagtgcaggccgtggggcgcgagggtcccgggcctgagccccgcgccatggccggggccatcgcttcccgcatgagcttcagctctctcaagaggaagcaacccaagacgttcaccgtgaggatcgtcaccatggacgccgagatggagttcaattgcgaggtaaccggccggcagccccgactgctgcggtgacagtcgaggtggaagctcgagaggttctctttatatcatcttatgggtgtagctagagacgggcagaaccggaagggccaactaggcccaaaacctcatgttaaagatgattgctgctttttttcataggacttttgggttttggcatttcctgaaggttattttcattcattgttattggaagaagctggatgctcctgtgatagaaaattcaggatttcagtgtcaggcttaagttaggcttacgcttaaaagcttgaaagtttattctttcattaggtaatattgttatgtacccaggtattagaagttgcgtcttgtttattggaaagccaatacttgtttcccttttctaaagc

SEQ ID NO: 69881 - DNA, 4331 bp, Homo sapiens
agccgggggcaatggcatgtgcctgtaattccagctacttgggaggctgaggcaggataattgcctgaggtggaggttgcctgagattgagccactgcactccagcctggatgacagggagagactccgactccaaaaaaaaaaatagagatgggggtctccctacgttggttgctcaggctggtctcaaactcctgtgctcaagggatcctcctgcctcagcctcccaaagtgctaggattataggtgtgaaccaccacacgcagctctgatttactgggtgcccacgttgaccaggcagggaacacctcctagcagtgatcaaggactactttggacctaggttctgtaactgacttcatctttaagtggggaaacagaggctcagacaggatacatagcatgcttaaaggcttagtgcagccactatctattctgaaagaggcagaataggacagggacaggtaggtagtgagagaatagggagaatagatgggcacaccctttaacttaatatcgaccagtaaagcctgcagttgcttatttgaacctcacattgaggctgacatgtaagttgagcaaatcttaactcaagcttcagtttccttgttggggccgctgaggcagcatagcctagagattacaagcatagacttcagagtttgattcctggctctgcctctaaccagctttgcaaccttaaagctccttaaccccctcacatgcctctgttccctaactgtaaaatggtgaatgtaattaattcttcctgcatagtgttacaagaattaaatttgagtaattactggtaaagtacgtagaatagtacctaacacaagataagtgctatatataatggttgttacctaaagaaataacagcctgggcaacatggcgaaaccctatctctacaaaaaatacaaaaattagccggttgtggtggtgtgcacctgtggtcctagcatctcgggaggctgaggtgggaggatcacatgagcctgggaggtcgaggttgccataagcttcctgattgcaccactgcactccagcctgggtgacagagtgagaccttgtctcaaaaaataaataaataaaataaattaaaaaaataaaaaggaaataagttcagtgcctgtcgttagcttgctccctttctcagcctctcctccacttcctcacgcaccctcttgctctgagcctattatcctggtccctccttcacactgccacatctttgcataggctgttctctttgcctggaatgccattctcatttgttgcttggcagaactgaactcattctccttctaggctctgctcaagggtttcctcttctttgtgtccaaagtcaccacatagcttctaagtgatgggactgagatttgaagccaggtcatctgtctttcaggccagccctctttccactaccctatgctacccaaataggaagcgtaaaagagaagtaggagagaaaaagttagaaacctggagagaacttaggtatttggtaaacaggaaaaagaaagtggaaagaagagatcatttgaaggacttcctcaacttaacaactatttgcctatggcattattttattgcatttggtgtatgatactatctcaaaagcattttgtaaacttgccagtggcttacatttttgccggatgaatgacatgactaacgatccgtgctacattacctcagtgtctagtttgtcattttgaatcaagtggacattttctgtaagtgaatcattttcacttgctcatgatataatgagaattccttacctttggcttaaaatgaggcttatgttataacagttaagcattgtctagttgcatatttaacatagtcagaatgctcctgcctgtattcagcctggtgtcttataatatttggtatgcccacctagatagcaattggtaacatctttattctgagactctttcatgtatggattttgaaaagttagttaactgttcagacgacattgtttctttgacttttacaatccgcttccctctcactgacagttcagttttggaagaccctgtatttttttttttttttttttttttttttgagacagagactcgctctgtcgcccaggctggagtgcagtggcgtgatctctgctcactgcaacctccacctcccgggttcaagcaattctcttgcctcagcctcctgagtagctgggattatgggtgtgcaccaccacacatggctaatttttgtatttttagtagagacgaagtttcaccatgttggccaggacggtctcgatctcctgaccttgtgatcagcctgcctcggcctcccaaagtgctgggattacaggcgtgaaccaccgtgcccggccttttttttttttttttttttttcgagatggggtctcactcagactggagtgcagtggtgctatcacagctcactacagacttgacctgctgggctcaagtgattctcctgcctaagcctcccaagtagctgggactacaggcacatgccaccaatacctggctaatttttttgaagaaatgggatcccgctatgttgcctaggctggtctggaacttctgggctcaagcgatccttccgcctcagcctctcaaagtgctgggattacaggcatgagccaacatgcccagctagagatgtgtgtgaattggtagcttcaagctagatattggaggctcatgaagcccaggttaaagaggcttgtattcatcagatgcgatgaagagctttgaagtttttactagaagtgtgatttaaagtggttggcatgcaaaatgatttggaacgtttggggtttggggtagggagagagaggttggaagtaggaaacaattagaaggcaaacgctttgggcaaggtatcacattgaaacctgaacagcagtgggacttgctgggggttgggacaaaactaggcagatgtaagcatctagtgaatctagagattagggtgttctgtgaccaagaatgagcagaagacctgctaggctcaagattcaggagattctcaggtccaaagccagtcctcagtctccgaagtcagtcaggcagaagggaagttggatcaagctggccagagttgagctcaggaagtcagtgcactttctcttgtctggttcctgcatcgttttacttgtgtaaaatcatcaagatccctaaaccgatgtctgaacaccaggcttctaggcagagctccaccgtgtgaccttgggcgcatcacttatttcccccaggcctcagttcttctgaaagatgaggggaagaactcacattcaaaggccctcagctttagcgtcttattttaggtgatctgggcagaagagtctcactgtgctcctctccctttcatatttcctgctttggtaggaagtcatctcaagacttgagtgtataggcatgaggaagtctgctagaggacaggaagaatattgcttaaagaataagagctacagccctgatggaaggggtaaattggcctgggaaaagccctgcctctgctacctgcttcccaagtgaccttgaacttaactctttaaacctcagttgctgcatctataaaatgagaataatagtatcttttttatagggttttttttgttttgtttgtttgtttttagacggaatctccctctgttgcccaggctggagtgcagtggcacgatctcggctcactgcaacctttgcctcccgggttcaagcgattctcgtgcctcagcctcctgagtagctgggattataggagtgcaccaccacgcctagctaatttttgtatttttagtagagatggggttttgccatgttggctaggctggcctggaactcctaacctcaagtgattctcctgccttgacctccctaagtgctaggattacaggtgtgagccaacgtgcctggccagggttgttttgagacatgaatgaggtggacctttacaggcacttggttcagggcctgacccgtagtgagcatttgataaatgttacctatctatgttgtcatgggctgggagtgtgggaacaggaagtgtctcatgccagaagcactgtgaattttctcctttaatcattgccttcattttctttgaaccttattcagattgtccatgcctttgtaattgtagaccctctaaactataattagtccaaataaaatggactcaccttatgccatgttcttgttgaagggtcctctttctttctttctttctttctttctttctttctttctttctttctttctttctttctttctttctttctctttctctcctctttctgtctctctcttctttctctctctctctctctctct

SEQ ID NO: 69882 - DNA, 2253 bp, Homo sapiens
aaacaaaaaccaaagaaaacaagactccgtaaggtgggttccaaggccagacatgagctgaccggagtcaacctcttcacagtccactctacttctttccctcaaacatcccaggactgtagctgcctcaaggcctttgcaccaacgttttcctgttcaactctactattcattcaggtctctagtcaagtgtcaccccccagagcagctacccagggtgcaatgtcaccaccactgcctctccagtcaaccaaagcactatctgtttgctgtactgcatctccccacccgcccactccgtagattgagcgctctgtgagagcaaggactttgttcactgctgggtccccagagcagggaccagaacaggcgctgggaaaacatctgttgaatgccccaggtactccaaagcccttgctcttttcaatcccaagcaggttccaagtctccagccttccaaaccagggttgcccggtgcgaagcccaggggtgagaggaacaggaagcagggcagatccgtccctgcccttaatccagggtgaagggtttaacctccaggacaagacttttgccgcaggctccagctcctggcctagacttggggctggtgcaggggacaaggcgaagagttgagccagggtctcgggaacccagctgccctcgcccctctatccacaccctatcccaagaaatggtgcgtcccgccgcagggcgtacgcacagagaaggaagtgttcaagtcttccagtgcggagaaaagagactaggactcgcccctcgacgtctcgcggaaggtacctggctccccggtggctgcagctccgggctcctcctcctgcgtcctcgcgtcgcgtactgcttgctgggattcgtagtctcgccttggccatcagttcgcccttcccagagagctttgggaatctaagccgggactgggcggagggcggggagaaggtgatggcgcgcgagggcttctgggagttgtagtttgacatattctaacagccaggaattctggagaagaaaaattgggtaataaatcttatcagattatctgggctgtcctgatatgaaccttttgagtttttttcctcattcccaggataggaatacctctgtggttcaaaacacgaaggctgagattcagaggaactacaaatcccataaagtgttgcacgtctagggcctttggggaacgaggtcggccccagcgcaggcgcggtggcgcgagttggactgtgaagaaacatggcggccgcgacgttgacttcgaaattgtactccctgctgttccgcaggacctccaccttcgccctcaccatcatcgtgggcgtcatgttcttcgagcgcgccttcgatcaaggcgcggacgctatctacgaccacatcaacgagggggtgagggcctgtgccatccctgaccttggacccgcctgaggggtgacagtggagtagaggtgggatgggactcagtatacttttaccaggaagggggtaaggggtaaaccgtcggcgtcttctgtctcgagtccgccgtctgtccccttggcttgatgtgaattctaaaacgttaagcgaggttaatatatttcattttgcaggggttgtaagtattgctgtgtgccaccctacatacccacttgcccattatcagaagcaaaaactaaaggctagtgagagcaaaggacttactagctgcacaggaagccaggggcaagtcagggccagaaacgggacccctgtctctcagagtttcaagggcagatttgagcaggcgacggtcgtgaaaaggacgttagacaccttagacgccgtggctgaagtttcagacggcgcttctggtccccaaggcttcccacgtagacagttggtattaatggttgagagtgggggctatgaaatcagaaagccttggataggaacactggtccttgtcacttaactgtggcattaagttgagcaagtttcttctctgaactccgttttaactgtgagatggagatattaatagtaacctgagcacgattgtgaggattacatgagatgcaggcagggtgccacatgcctggtaggtggtaccactgaaaaataatcattgcttacattcctcaggagaaagtggaagcatgaggtaggaatcgcaacacatttttgacttttatgtatcatgcactgtgctaggtgcagtgcatgctttatatcgctaaattatgactgtgctggagtaggccttatacatatagccctgttcca

SEQ ID NO: 69883 - DNA, 717 bp, Homo sapiens
aaacagaaagatgttcacaatatctcattacctgaataaatggtgataatagcatgtgtagtacgatcccatatttgtagaaaaccattatgtgtattctttttttctaaaaaaaaaatgctgtaaggataagaactaaaatcttaacagtgattatttccgcatggcaggattatcagtagttttcctttgcttatttgtgtgaaccacaccgagcatgttactgcttttgtactaaggggggaagcaatgtaagttattaaaaagaaatagattccatccccatgactcagtcagcccttccaaacacaaggaacaaggaccgtcctacaaatgagtttgaagtcctctggggaaaggacagaaatcaatgaatttacaatgcctgagcaatgtgcaaagttggagagaatacaaattccttgcacaagacggaggttgtggcagctgcttgagtgacagcaaaggacgaacactctgtactgtgtggggcaggcaaccagcacacacagaagatcacacacacaaaaatagtgccttctctgggcactcactcgggggcaggcctgggccaggtgccgcacatgcaccctgtgtcactggattgtcattccaagtggaaaatgaggctcagagaggttaagtgtcttgcccagggtaacgcagctagtgagagtagagcagagatccaaatgcaggaccattggctatgctcat

SEQ ID NO: 69884 - DNA, 2074 bp, Homo sapiens
ttggggctgactgtacagctgaatcagccaagtgcctccccctcattgtcccagctgctttaaaatcgtgttctcggcatcccttccctccctctgaggcctgatcgctttcctgtgttctcctttttgtcccttggcaatctcattttccatgcctccaacactattttaagccccagtaaccgtgtatcttcctcgggcatcccttatctctccccagcacctttcactgagaacagagtcctctcagttccctccatccttgctgtctcagcaggcttctgtctccctccagtgcaggccccaaacagggagggccacctcttgccctggggctgcaactccatgcgatgcctgatctccttagctcaccaagctttcctaatggaaacatctccttccattgggccctctgcagggaatcctttccctccactggcagtcaggagaggctacagcagagcagagattggggaaatatgtcctgcccagcttcctactctcttccctttcccctgcccagctttctactctcttccctttcccctgcccctctgccaatagaatgacttgaattacaggctatatcagcaaaagcaaggtatttagaacaaaggaggtgataggccctctttttcgtgctgagctaaccacatgtggagtattgtagcttccagttcaagtgcctagctataggggaggaaagcctataggggctgagagaatggactttggaagctgcaaatctgggtttgaattctgactcagccactttgcagccaaaagcaagtgactgaacttcctttttatttttatttttatttttgagacagagtctcattctgttgcccaggctggagtgcagtggtgcgatctcggctcactgtaacctccacctcccgggttcaagcaattctcttgcttcaacctccctagtagctgggactataggcacatgccaccatgcccggctaattttttacttttagtagagacagggtttcactatgttggccaggcttgtctcgaactcctgacctcaggtgatccacccgccttggcctcccaaaatgctgggattacaggcgtgagccactgtgcccggcctgaacttccaaacaagacttttaatcaaccattttcctggctttgtttcaaggattcactgagggtaatttccagtcctacaaagctgtgtggggcacctcctctgggctcccaggacaccgactgcacacttaccaggcctgtcttctgtgtccagcttgtgtatccaggccatccagagcccatgggagatggcccaggaggaattagggcagctctgccaagagagtggggtgtggggtgcacagaaagccagctggagcattggctggaagtacctgccactcctctcccagcccggtccctgtgggcaagtccctgtgagctcactagcttgtctcacggcagaccgggactgtacacaccttatcccagccaccctgccaacatctccagtttattgataggacaactgtggcttcggaaggtgaggccaccttgctcaaagtcagagagccagggagtggctgagcccagctcagttctgaccccagagcctagcccctgctctgaatggcaaaagcaaaataggccaccagccatttaggggaccctggtcccccagggaaaaggtctgacctggccatcacgtcttactctgaattaacaccctggggagcgttaaatgcctttttgtgtaggcctctctcaagcaggggagtgtggttttccaggtgtgacaggccacctcctgtttgacaggtcatcaagctggtcctcatctgtcactgtcactgtcctgtggcaaggcctctgaccctgaaggctgggctgtggacattggctctgtcatggggcacctggggagcccatcagagtgaaggggccagtagcttcactttcttctaaacaaactcccatccaaagggctcaaatatggagtttccaaccttccctagagacaagggcctggggagaggctgtttcacgacagaagtcacccatggaggcaaaagccttggagttc

SEQ ID NO: 69885 - DNA, 564 bp, Homo sapiens
cagccttctgtctcttccacagctcaagtttccatgtaaaatttcactggaagaaaatgtttggaagcccaactctggtcacgttacaggtgaggaaactcgggtgcattgggtgggagaaggaacatgtttgggtcacaagtgagctgcagcacagcttcggcagggactgaggcttctcaactcacggctttgcaaacctgtgaaaaaacctggcttgtcagaaacatacccaggcctgtggaatgtagcttctagccctgcaggggaaaatcaatatgagatgccaggcaagaaaatccagcttagctgtgaaatcgggtctctggaatgtatcaagggtaagataataaaaaaaaaaagaaaagacacaaagccaaacagagcttccataaaaatcttctattaactggcttttggtgcagggagaggcaggcgtctgagtccatctcagtctgtcaggctatctgcctggcagccagggcaggtcaggactgcagccttcagcatggcgggctagggtttgcctcccttcacatcttttttttttttgagacggactct

SEQ ID NO: 69886 - DNA, 2173 bp, Homo sapiens
accttggcctcccaaagtgcagggattacagccaccacgcccagccggcacagatatttttagaacacatgttgtcttccagggcaccatggaatggtccaaagggattaggggaccctgcctcttgcccactgactccttcactggctatgatatacctgtagcacatgtattgatgtctccacaacagccatgctgcacctcacccattctccaaacagaccctacattttctttaggtctttctacctttccgtttcaccctggagctccaggcctgcaccctgtgagttggttttcctgatgagatatgaggggtattggagacttctgggaaaggtatcctaggctctaggagagacacaggaagacctggtctggactatctcctggcactgtcatgtctggaagccatagtagaaacagctgcagcccctctgcagcctcaaaggaagtagcctgaccacgaagtgaggccccaagagactggaaagatacattctggatgataggtcaaccaagcctagacggccctaccttacaccgccttgtcatgcaagggaacagatttccttactacttaagcactgagtacagcctatctgattcaacaacgaacacattttaactccactaccatctgcagcgtcctacctaatttctcatgggattaggacatgtgtccctgccgaagttcctgtgtaccccaccccagcacctcccactctgtccttacttgtttaatggtctttcttatgatcatttgagggcaaggccgggtatccagctcaccctgtttccctggtgtctagcataggatctggtgctactaaatctcttaataaatatttgctgaatgaataaataatgaacacatgaatggaggctttgcctctttgcaatctgcagcccctgggctacccagcacagtgagtctctctgcgtgccagcccagagggccccaggaacaagggcacagtgttccagaaacctggccacctcaatgccagccactctgctgaccctgacagctgggaccagccccttggcaaatgctcgtaggtgacttatgacctaggtggggtgagatgagactttacaataccatgggccctggacaaaaccacagatcaaggtgaaaggccatatccagagatggctaatctctgtggggaacttaccaatcaggcttcctggattggagcagggggccaggcttctcgccagcctggaggaccccttgtctgccccttgcccaccgctggagctacagagggccatgctggcctggaatagcggccactgatccaggataacatctttggcctgggatctgggggtgttgcaatgtgtatgactaagcagtttgcaagtgcttcctgtccagccagccagacggctttgtagttgccctgcgccagttccccaagccctcagccagccaagcttttagcagtggacagccctagggaggggtaacagcacagggccctaactgaagaagcagctggcatttccgccactggggctcctaccacaggaacaaggctggctggtctcctccctctctgaacctcacggtccccattcacgtgatggtgaaagagcagcctgtacttgtaaagaagtcccctgatttctagattccatgcagaactttgggggactagaatacatcttattttgctgttctctacttggatgttgtactctttaccatgacatccaactctctgtccctctgatgggtcatcattccaacgctgggtgaactctcttatttttttttcttgagacaggttcttactgtgtcacccaggctggagtacagtggcacgatcacagctcattgcagccttgacctcctgggcttaagtgatcttactgcctcagcctccagagtagctggaactataggcgtgtgccagcacacccggctaatttttgtattttttgtatatatggggtttcgctatgttgcccaggctggtctcgaactcctggactcaagtgatccacctgccttggcctcccaaagtgctgggactaggcatgagccgctgcacccagccctgatcttttcaaaacataaaatatgctggctttgtcggttcatgggaccctttgctgtgctcactatggcctcgggaccactgtccctgttgctctgctt

SEQ ID NO: 69887 - DNA, 669 bp, Homo sapiens
atatgccagccttaaattttttaaaaggagggagacatataatgtgcacagttgctcatatgtgcatatattcttgcatatctctggaaaattccaccaaaaaaacctaatgatggctgtatgtgaataatagaactgggaaagtagaaagggggactttccagtgtgtattttatactttttgagttttgaaccatgtgaatgtgttatttattcataaaagtatatctactcagctatacttgaatagatgggaaaggaaggaggaaaaaggttattttgagagggattatcaacaaagctgattgggcaactgtaaccactttcagagaggcctggagaactgaggtggctgtatttgctcagcagggcgttcctggcctccagcacagttggaggctgggtcagccccagggtgttcgtgggtcaaaggcagtgttgcctttagtcaaaagtgtttccctttcttcctcctcaccctgagatgggtatagcttctcccctgcctctgctgtcccttgcagtaaagtcagctcttccaaaacttatcccttccccatctccaaagagcctttcaaaagcaatctgtgccacatttggggaaacactttaacaaaatgggaaaatgcctatgataagcgaaaatatgcaaggtacgaaattctaaga

SEQ ID NO: 69888 - DNA, 1475 bp, Homo sapiens
acctgggttcaagtgattctcctgtttcagcctcctcagtagctgggaatacaggtgcatgctgccatgcccagtaatttttgtatttttagtagagatggggtgtcaccatattggtcaggctggtcttgaactcctgacctcaggtgatccacccgcctcggcctcccaaagtgctaggatgacaggcatgagccaacgcgcccagcccattgtatgtgtgtgtgtattttttttccctgccctatcctggtcttggccaaaaacaggagtgcttctaaaatgcaggcgccacacaagcaggaggcttatctgtcgttttcactgctgcatccccaggctggaagagggactggtacattctaagcacccagtaaatatttgttaaatgagtaaatatttgttaaattagtacataagccagtatctctatttcaacagccagaactaccgccttacctgtaacaaaagtcgtgcttctggaaggtctggcaagccaaagggaagatatccagaaaggcccaaagtgtggtgcaggtatcacaaaggtagagaacaatgtcctttaattcctgttgccaaaagaatacactgcattattctcctctgtccacacatacagatctgcagagcacctgagacaacattaaaacagtcagggtcccaaacaggcaggatgttacacaggaggaaaagaacactggaggtcccaggcaaagtctggctagtccatcttcaggagcacgatctgggtgagtcacctaacctctctaagcctcaggtcattactccaatggccttacacccaatcaccgctagggttacttccagttctaagataatacagttccctcttctaagctaaaggaaaaccaactcttgaatctgaagacatcatgcaaagaaggaacatccgaggcaggacaagaatattaagtccataggtttttcacatcttgaagagggtatacaaaacactttcttctaagtttcttacacactttcctggttctcatgacaactctgaaaagtaggctgggaagctattgaggatctttattttacagaaaaggaaaccgaggttccgagaggtaaaatgatttgctcccacagcacctgccacgtgcccttctgaaatgagatcaccatctccaggaggacagctcatagctgccttgttcctgttctatctccagggctagggcagcacctgacacatgttgaggcttcctgaatgtttgccttctatctgtcacccttgtcaactctaaattccatgagcgcaggggccagtctgcttttgtttactgctttgcctccaggcatagcacagggtctggcacatgctcaggactcctcaatataagtccactgaataaatggctcaatgaataacgcacaagtgaacatgtcaaactgaaataaatgaggactctgaatccttattccccagttctttccactactctataaat

SEQ ID NO: 69889 - DNA, 1028 bp, Homo sapiens
agaaggctagcatgtaaggattccaaaacttactgtgaacagtagatatctcttggtggtgggattatgagggaatgataatgttcctctttcattttttattttccgaattttctacaatgaacattatttcatgaaataattttgtaaaactttaaagctactttttgagaaacactggtctcttagagggatatccttagaggcatatggctgttggcaagcaacaaaaaatgcaagccaaactctgtctgtatgagcgccagccagccagcccttaggcttaagtcttgttcaaaagggaaaacggcaaatttaaagaggtgtagtcaggggtaagacaaagagactgtctggggagatgcgagagtcagggaataaacatttcctcagctcctccaggaaagtcaggcaacaccattgagttggggaggtggcctatcctccaagctcaacctcccctgcgcagggccaagagctggtacctgaaggatggtaggcagggtttcatccaggtcactgtagtaacttggctgctgtgtaaagatgtttcctaaaaagagaagagaaaggttggaattgagaaaaggtgggggctcggggcagtgaagaggacacattacaaatggttgccagcaggtctgtgacctttctcccttttcctaatcctatctgcagctaggacctaggacgagtcctggccccaggccctgctggcactgagctttggcccagcctagaagcttccccagggtgggggagggaccttgctcagtatgatttaaccttttaagtacctctgcctagtgaattacataaaagacccgccctggtcaaaccagctcacactgatgtccccagggagtgatcacacttgggtaccctgcctcctatgacagctttggctctgcaagttggagttagtcatccaggaaaattagcagataggatctctttgctcaagaaacatggatgcaataatccaggactctccaataatatgaggagattccagggagatatttctc

SEQ ID NO: 69890 - DNA, 900 bp, Homo sapiens
gataactcagttttgtaactaggtatttcgaagactgtgtcctacagtctccaggtgaggagagctggcaagggcgtccagggtgagcacccctctgtgccaggcccagctccatgagctacaattcaaagaggaattcactggggcgctccctctgtaacgtcccacagtgcttctgtttctctttttttcttatttttttgtgtgtgtgtgcgtataaagaggaacctctaaaaaaaactgcttgtttttgatcaaaccttctcccctctgcctgctaatgggatccaacggctaatgtccgttccttttgcaacccagaagagccctctctgaactctgtccctacctgctctcagcaacaatgcaaatcatgacatttttgacacagtgccatcatccctgaagcagggagttgcagagcaagagcttgagagtcaggtctacgtttacacacgtcccagctgggccacttattagtcatatcctctcaggcaagtcccctacattttaacctcagtttccttatctgtaagtggggatgatgacagcacttatctcacagggctgctgtgaggatccaattgacataacatatgtggagtgcttggcagaatgccaggtccccggaacactctccaataaaggttagcttagttatcactgctgttcttacattcgtcgccaaaggaaacttccccattcctatgtctgatgcatggccaattgcataatactaatacactcccaaggcagaatggtggcttacactgtaatctcagctgttcaggaagctaaagcaggaggatgacttgaggccaggagttcaagaccagctggaacaacatagtgagaccccatctactaaaaaaaatttttttttaattcgccaggcatggt

SEQ ID NO: 69891 - DNA, 1828 bp, Homo sapiens
aaaaaaaaaaaaaattagcagggcgtggtggtgcatgcctgtaatcctagctactcaggaggctgaggcaggagaatcgcttgaacccgggaggcggaggttgcagtgggacgagatcacgccactgcactccagcctgggcgacagagcaagaccccgtcttggggggaaaaaataaattaactggacaatctgaactttgagctccaaaaggacaaacaataatcatgactatgtctgtgcccaccactgtattcccctgccaggcaggacagcaaaagccaaaagctaagaaagggagggggagctccctacaagcacccaattgcaatatggcctgggagcatccccggggctactgctccctcagcctctttgtcatcattcctctagtctctcaattaaatactactctcctcagagaccttctgatggctctgcctatagtatccactctcccagttactgtcatagctttaatgaccttgtgcatttgcttgtcgttgaccatctcctcccactagactgtaagctccatgagggcagaagccttgtctgtcttgctttctttgtatccccaatgtctagatctgtgtctggcacataggaagcactccacaaatatttgctgaacgaatgaatgaaccctgaggaaactgaagccccgggtgtgaggacgtggggggatcgtggctggtccaacgccactctggggccgaacttcgaacccgtggctcctgaccctggcggccaagtctcgagaggcggctcacaacccctcaggtagcgtaagcgtgggccccgcaatggaggccagaggatgggagagccaaggctgcccaaggcatagccgcggctcctccggggtcccttgccctgcatctggcagggaccagccacgcactcacctcggcggctccaccaccggctctgtgccgccgccgccgccgccgccgccgaccacggtgacagctccctgagcgcccgcacttccggggtcaaactgcgattccgcaggagcagacaggaagtctcggcctggccccgcccccagagccgagcaaactaccgccgggaagccggacccgggttgcgcctctcttcttaagactccgccccacactcggcgtctgtagccacgcccccttcccctcctatctcccttcctgcttaagcagagaataggtcagctgagggcgggctgtgtgattacacctctcgggaaatccaagtatggcacctgagaggacgtctcggaatcccaggcttccaccttctgcccgacctccttagtcaccgttttacatatttaatccagaagagaaattttaacaagtcaaaagcacgaacataatgttaagcagatgtacaagtacagactgcgatttcatttacgggaaattctagaacagacagaactcatgagtagtgatggtgttaaaattggtggtttcctctggggctgtgggctgggaggggccacaagtgaggctggggtcaccccctgtcttcatctcggtggtagccatgtagatgtgttcactttggaaaattcatcaaattgtacgcttaagatttgtgcatttttctgtatgtatgcaatacagttttgttctgttttgtttaaggaagttacaagtatagctatcctaagagaaggatgcaattttttctacagaatgtctcaggtaatgtaggtttagtggttcctaagcctgactatggatcagaatcatcacagaaaacttgttaagaacacacattcctggcttcatctcagtgcctggtacacagtaagaattcaaaaccaaccaccatcattattggg

SEQ ID NO: 69892 - DNA, 1296 bp, Homo sapiens
taaggttttggaactaaataacatgactgtaagaagacaaaacatccaataagtcacctaacttctccaaacatatctgttttctcatctgttaaacaaggtagttaatatccacctcatcatcattagaaggcttaaggctgggtgtggtgactcatgcctgtaatcccagcactttgagaggctgaggtgggaggattgcttgaggccaagagttcgagaccaacccaggcaacataatgagacttagtctctcaaaaaataaaaataaaaaaactagctgggtgtggtggcacacacctgtagtcccagctactctggaggctgaggtgggaggatagtttgagcctgggagatggagtctgcagtaagctgtggttgtgccacggcacttcagtctcaaaacaaaacaaaacaaaacagaaggcttaaatgagataatatagacaatgccaagaacacagtaggtgctcaaaaaatgttagtgaaaaggaaggaagaaaggagactccctatcagctggagcgttaacttttacatttctttcatctttctcccttgcctaaagagcttaatgaggaatgttggtttacaaaggacacattcttgtctgagctaatatgtgtccaactgaaattaaatttaaaagctggtttaacaggagaggactcaaatcatgcataagtcatttgcaaacatgcaaatacagagtaatttcttggcctggcttctcctctagattaaaagaaaaacaactaatttaagaacaatagtttgggttggcaaaagagaggagtgtccatggttcttaaaaccaacaaagtgtaggggtaactagggagaaaactgtcaatattcggtgccacgaaatagacattgaaatatctaggtctgagtcttgcctggcccagacactctgagtcacctcagatgaatcagtgttcccttcttttgcacatcagtcctccagcaagcatgtgtttgcagagcactcattgttgagattagctgttgtttggcatccagtgtttatttcctctgttttcctaccaatagcaacttgatcactccttagggaactgtcactcccatttcaatatgtgtggagtggggttgaccccttacccagagtttaagtgtccaaaattgtattagtcatctggggctatgcaagaaatcatcccacaatacagtagtttaaaacagtaataggccaggcactgtggctcacgcttgtaatcccagcactttgggaggctgaggcaggcagatcacgaggtcaggagatccagacca

SEQ ID NO: 69893 - DNA, 1263 bp, Homo sapiens
aaaaatctgtaggaccacctttggttttcttccagatttttttttgtcatctcttttcctccacccatttcccatctgtctagccattcttgctccgctgggctttttcgcgagcctctccccagctgcagccccgcccatctcctggggcgtgaccacctgtccaggccccgcccccgtccaaccggcggagacccgccccctttcccggacaccgggctcagcgcccgagcgtgcgcgcgcgtcctcgctcgtcgcccggctcggcgtcgggagcgcgctctgtgtggccgctgccgccatgttgttgtggttgtgagaaggcggcggcggcggcggagtagcagccggacgagacgtcccagcggctcaggcgctgcccagcgccggccctggcagggagcctggtggggtggcggagggggagactgtgccgtggagggcctcgccatgtcctgctgcccggtaagaaccccatccccgtcctccgtctcctcggcgggtgaggaagagctggaggaggggccggcctcggccccggccctggccaggcggctgtcaccctctgaggaggcagcgccctgggagggctggggactgcgtgcggggcccggggaggggcgtccccggcggctgtcgccgccagggggaggcgctgggtgtgggagtgggaatgggagctcggcggccgagctcggcccggaccctagatgcgggggaggcggggtcccgggctcgggctgccttcccagacctggcggggatgggcccgtgcggctctgggtgtgggacgtaccctcggagcgcccggagttattcccacgaactcccgggaggtgggtgtgcgcccttcgccccctgccgggtctgtggcggtccatcgttgccggatactggaggtcaggggccatgggagccccggggcgaacggtgcgggcctgggccttgtggaaaggaggagtgaccgcccgatcgtgcagcagggcatccccctgacctggtagtacttaggtgggtaggatgattgggggcggttggcgtaactgagggaaccctggtcagactgctccgcaaatgattacagtgttatttctccggtagtaattttgcttgatgtatggcatttccggacccataagatgatactgtaggttgtattttggactggaaaacttatgtcaaaattatggggtagattttttggccacattaatagactcccctggaatttgataatctcacttgtgagttttggacatggac

SEQ ID NO: 69894 - DNA, 411 bp, Homo sapiens
gcttaacctcctttgtattattcattccctctcttactaaaacaagtgaatggcttgcttggatgtgtatctgtatctttttttttgatacacactttgaaggagtcttctgaaatgcagtgttttggccaccattccagctctacaggaatatggtttcatgataaagccaacaaagagcacactggcagcagtccagcagctgactcaccaaggagtaatgatagacactttgaaaggagtgacctgtctcaggatctcacatttcaaagcttcgtgctatgattacattggtagaaggcagccaagaaatctagatgagatcttgcttgtacctcctaagagtaatggtatataggtaggaaggacttccacagtcggatgcaagtaagattttttttcctaacaacc

SEQ ID NO: 69895 - DNA, 1228 bp, Homo sapiens
aacctcccaaagtgctgggattacaggcatgagccaccacgcccggcccagtttttggctattacgaataaatctcctctgaatatttgcaacatagatctttgtgtggacatatattttcatttctcttggttaaaaatccaggagtagaaattgcaggattgtagggtaagtgtgtttatagtttttaaagtaacggcctattttgcattcccactggcaatgcatgagaattccagggctccaaatccttgttgatgcttggtattgtcattcttactaacttaagtcattctagtgggtctgtagcaatacatcatcatggttttagtttgtaatttccagatgactaatgatgattatcttttcatgtgcttatttgccatttatatgtctttggtgaagtgtctgttcaaatcttttgctcattaaaataggttgttttttgtttattgtgagttcataatgtattctgaatatgagtccttcataacaggttttgtaaattacatgttttgcaaatatgttcttgtaatttgtggcttgccttttcattcttaacagtgtctttcagagagcaaaaacttaatctttatgtagtcagttattttttttttctttttgagttaatgatctttttaaaagcctatctaaggaattgtctctaaacctaaggtcactaatattttcttaaattttattctggaagtttatagctttgtttgacatttgggtctgtgaaacacttcaaattaatactgagagaagtaagtgtagggttgcctttttgtatatactgtgaatatctgagttttcctctgagcagtgcttcagttgcagctcacaaaatgacatattgtgtactactattcagtttgaatattttctaatttctcttttaatgtcttttttggcctatgaattataaaagtttgatgtttaacttcctgtagatattttactgttactaatttaattccattgtggtcagagaacatactctataggatttcagtctttttcaggatttcagaatttgagatttgttttgtggtaaggcatatggtctattgtggtgaatgttttgtgtctttgaaaagacaaatatttggttctaccagttctgtctcatatattttgaagttctgtttttaggtacatacatatttaggattgttatgtcttctcagtaaattcattcttttataatgacttgtcccactttatt

SEQ ID NO: 69896 - DNA, 673 bp, Homo sapiens
catatctattgtttaaagaaatctgtagccaaaggtgtctgtttttagttgggtcattgtttaggactatagacttcggttttgtattcttagtaatattaaccccttcacctcccctgataacccaagaaaagatccttcgtataagattttaaaaattgcaccagaggagccaagtggctcatgcctgtagtcccagctactcactacttggcaggctgaggtgggagtattgcttcaccccaggagttcaaggcccaaggccagcctgggcaacacagggagaacgcgtctcttaaaaacaaacaaacaaaaaaattgcactgggatttgcattaaaagttgcaatacatacctagtatgttttctaatcataatgtgcaattttaaaaaaaagtgtaatttttatctgccttctaatttgagcctttattgttcaccagtaggtttatttcactggaacaagtctttgtgccatatttggcatcaccaaaggaatagtgccagtatttattgacaaatgaggacaaatagtttttccacattctattgccatcattgttactaggtaaacaatagaagcttataaaaatattgtgcatttaatacctttttggtttccttttatacttgtcaaaagtcatttatacataaattgacatactgtgtccat

SEQ ID NO: 69897 - DNA, 590 bp, Homo sapiens
tgatgcctgaaaagcccagatcaagctgagaacaagggcctggctgtctgttcaggaaccctctgccctgttctgcctcggtactctgtcacccctcattgctgaggaccctaaccaatgcatgcacagagagtcttggcttctgacagctctggatatgctctgtggcgccttcatgtagtaagtcattgaaggctaagtctctgtgcaggcttcactggtgactcacacatgtccccacccctaccattccatgagatgacatgggacttctgtctcaggcactgtttgctctcaagaatatgctgcctgttagggaagatgatcaggcagataaatatattcataccctcatccaaaaagaacaggacctgaaaaagcctcttagaggcaacccattgaaaatggagaccagtgtttcatacagcacatagtgaaaaaggtttgatccgaatttaatcttgtaaaatgaaactattattgaaataagtatcttttttgaatcgacaaaattatatataatatacagtatgttttgaaatatgtatacattgtgtaatggtttaaatcgatctaattaacatatgcgt

SEQ ID NO: 69898 - DNA, 1484 bp, Homo sapiens
tatatgattgcacaataggacattatttcatgtttgattttctagtgtaatcaatcacaggatcattttaggaaaagttagtcaagggcttcctcaatttccctcttaaatcctttagtctttgatattcacatcatccccctaggaaacacctaattggttagacatgtcaccttccccttcatttgttaatggacctactctctgcgatccttatttccaatggctacactcatctgagcagtttgccaacacattcaccaactatgtgaaattctgcatattttacaaaacttaaattgtactttggtgcctgttttgttgtattttcaacatctcacaatccgtaacagggaagttgggctatggtggatggagagtatgttaaggaggaagagatgtttaagtggagagtgatttttctaagtggttgagttgtgtagagaatactcttcatgtctgatgactttagctttctccacaactagtggctacaggaacttggatactgactagttggagttatagctcagaggaagaagagagtacatgtacatctgagcagggagcctgccccttgggggatagcagtgacatcaacacatggcaatatgatgacgtcaaggtgagccaaggcaagtgggcgggtttcaggatctgagccagagggcatgggttagcgaacaggaaaggcaggaaatatttgttaaaagcttaggccaaaaaagtctcctatgtcaggccaaacactggtcccaattctataggtatttgaggtttctgaacagagaatggaacaagatgataatagttaatatttgttatgggctaggcactgtccaaatactttccatgagtaacacatttaattctcctattaacctggtgaggtactgtgacagcctcatttgaaactaagatgactgagccagtagagctgttaagccccttgcccaaggtcacccagaaagttgaagcagctgagccatggtttgaatctggcccctctgcctcctgaaatcacgctctcaaccgctgcgctacccagtctctcctgggcccaggatgaatggaagtgggtgctgggaggcgaggcaagatgaggtggaaagagcagtaagaggccacctgcatgaaaaaggcctaaaccagggcagagaagggttcaagagcaactccaaagaacactgaatgttaaagtactagtgctgtttcattggctttacacaggactgtttctttccaaaactcagtaagtcatgcatgaagcaatcaccaatgcaagaatcaatcaggggccgggcgcggtggctcatgcctgtaatcccagcactttgggaggccgaggcaggcagatcatgaggtcaggagatcgagaccatcctggctgacatggtgaaaccccgtctctactaaaatacaaaacattagccgggcgtggtggcgggcgcctgtagtcccagctactcggaaggctgaggcag

SEQ ID NO: 69899 - DNA, 1888 bp, Homo sapiens
gcaatttattgcaggttcggcatccccaatccagaatctgaaacgttttgagaactgacatgctcaaaggaaatgttcactggagcattttggatttcagattttcagattagggatgctgaactattaaggataatgcaaatattccaaaatccgaaaaaataaaaaatccaaaacacttctggtcccagcattttggataagggacattcaacctgtaatctcagcctagcttctgaagcataaaagcatagcagcagacaaacatgcaaataaacttatgtccaacccaaaagtctaatatctggtttgactttgtggaagaaaaggatttcctgtttcacagaatccttttgttccttgccctttttacccagagagagagagagctgcttagcataagtcatggaaggatggctggggactatcagaaccctcaagagaaaggtttgttggtctggtttatgctgtatttaggagaaggcccaggactgttactacagtcaagactggaacgaggactcagggcaggggtggggtgggtagtggatggagaaagaggagagtaaccaggaagagaaatgggtacccaggtatcctctgagggtgactcgaaagagagatcaaaaagcaactgactgtgaaagtcaggaatcacttttgccatcaccggaatccatgaatgttgaagatcgactgagcaggctgttttctttctggtgatggacagttccttctagatgcagcagaggtacaattccatactgtaatatgttggataatgagccttcaactgggtctaaaattaggactttgacacacaagaaaaatgtcttcaggcttcaggtttttgttatctggtttcttttggatacttttagctcttcgtctatcctccagaaaagaccaagctgacccactcattgtcagcacaaagaatgctgtaagggtcactgaagacaaatcgtgctggtttgggaataagaaaaaagaagacaaactcctcttgccacaactatgtgctagcctagaagtgcactttagtcatttattacctcatttgaattgatctatcatatgatcaacatgactcaccggtgcctagagactctctaacttgtttttcctggccctgtgccctactcaataccccacaccccagatttactccttattacagctggcttgtgggaaatgggactggcctggggttctcaagagtgggctgagctacctctccagtagtgctctcgaaagtggctattgtttctgaactgagagctctgcaatgagcagacactgcatggactgttcttctgaagatttaattccacatatatagacattgcccaagaaggctcttcctttagcatggtttgtatgctcatgttccagtcttcttatttcctacctggagaactcttgctcttcattgatccattaattcttggtgtgccaatttgtgtttcagctgtgccaaaatgaaggatcgggattatcttctaaacaaaaagaatgacctccttctcctgcgtctaggccctaaggcatttccctgctcactaatgggattaagaatattttcatatgtttattggccattgtgaatttttcttttttcttttttttctcttcttacaaacagatgttttattgcatttggtccacagtcgtatttcacattatctcatggagcagggcccctgggtgtgggtccctgtgcagtacttggtggggcatgtggccaggggagatggagcagtatagctggtcaggccaagaaagggagaaggagggctgggggctctttaaaacctactgagaggtcaggcgcagtggctcatgcctgtattcccagcacttggggaggctgcagcaggcagatcac

SEQ ID NO: 69900 - DNA, 1758 bp, Homo sapiens
ggagtctcgctctgtcgcccaggctggagtgcaatggcggaatctcggctcactgcaacctcagcctcctgggctcaagcgattctcgtgcctcagcttcccaagtagctgggactacaggcgcgcgccaccacgcccagctaatttttgtattttttgtagagacgggttttcaacatgttggccaggctggtctcgaattcctgacctcaagtgacgcgcccgcctcagcctcccagagtgctgggatcccaggtggagccaccgcgccgcacttctcgggccttcttctaactcgggtccctgggccccccaggctctcgcttccctcccctacgccgccccgcgcccgcctcagacctctctgggacccgccggcctggcgtcctggcccgcccgagccccacggtccctcgggtcctaacctcggcggggcaggcacctcctcaggaagccccggagcaggctgtcgttgtataggtggcccaggctggcggcccctgaccgaaggtcgcgtcgggtcagtgtgcagcccgtggctgagaggcggctgctgaggggccgggcgggctaggggccggctagccgccgttcgcccctgctttgcatattcatgaagtctagcgaggccggtcgcccaggctagccgtggacgggtcatgaattattcatgaggaaacctctggtcccgcccagaaaggcctcgttgactattcatgagccgaggagcgggtttgggccggaaaaggccgttgacccccggtgggagggaagcgtcgacgagctgaggtgagggctgttgagacgcgaggtctcggcccagagagggcactcgggcgttgttagttctgtctttatgtcaaaaaacaatttttttttcttttcttattacttaaggctttaagttggatttgaaagtatcatatttcgtgagggcctaaagtactgtgaagagaatcgggagggcagggggctgaggaggaaggcaaaagggaggcgatttcccccagaactggacagagagcacccaggtagttttgaaattcagatttttctggacatgaaatcaaacttgctgagcaagcagcagccataatgagccatgatgaggctggcagggcagacgatgtctgtgcccgacattggagggggccgtgtgtggtggagctttggggaagtttatcttacctgggtcagattctccccagccattgaggttttctgccaggatcgatgcctggtacaggccaagaggtgagagaggtggggacaagacaccccgccccccttgacctcagctcccctttcactttagtgaggatttgccaattaatccctatggactttagttccctaaacagagggagagagtcttgaacctcaggattagccaatcgccaaaatgtgtccgagtacgcagggcactggacaggctgtgcagtacatcgtgtactcagctggtagaaatgaggggtggttctggcccctaaaggggtttttaatctcagcaggatcataatctaatttctcctccattggaccatcaatctgttgaggtaggaacagtattttacatctcgtaatcctgcatgttgttgcctggcacattgtagttgcctcgtagatgttgaatgaatgaataattgaaatagcatgaaaaagatattaaaaagtcaaaagagcatgaacaaatactcaattaatatagtggaagccattttctctgaatgagcacaggtaggggaattaccagggcca

SEQ ID NO: 69901 - DNA, 1125 bp, Homo sapiens
ccactacgcccagctaattttgtatttttagtagagatggggtttctccatgttggtcaagcatgtgccaccacgcccagctaattttgtattttcagtagagatggggtttctccatgttggtcaggctggtcttgaactcctgacctcaggtgatccgcccacctcagcctcccaaagtcctgggattacaggcgtgagccactgcgcctggcctacatttgagaaatattaaggtgatggaacatgggaacgaggaagggattaaggttgagtcacagattttgtgcttgagcaactaggtatgtgatgatgtcattcactgagcgagggaacagaagtaagtttttggggaaaataattcacattcaaatgtgttgagaacatcaaggtggaacagtcttatgatcagttagaagaacaagtcagcaacttctgagagagacctgggttggggatatacacataagaatcaataagatagaagttatacttgaaacaatgggagtgtatttgttcatccagggagtgtgtggtagaagtaaaaaagaagagctctgttttagtctgttcttgcattgctataaagaaatttctgagactgggtaatttataaagaaaagaggtttaattggctcacagttccacaggctgtacagaaagcatggtagcatctgcctgacttttgaggaggcctcaggaaacttacaattatggcagaagacaaaggagaagcaggcacatcttacatggccaaagcaggagagagagagagaggaaaaaaaaaaaggttctacacacctttaaacaaccagatcttgcaataactcactcacttactattgcaagaactgcactgagggtatagtgctaaaccattcatgagaaactgcccagatgatccagttatctcctactgtgcctggccatgccagctgctaggtaactgagtcagaatttgaacttaggttccttaactctaaaggctctttctactagattatactgctggttatttctctctctctctctatatatatacatatatatatacacacacatacatatatacatatacagatctgtatatgtgtatacacacgtacacacgtatacatatacaca

SEQ ID NO: 69902 - DNA, 1160 bp, Homo sapiens
acggaaaatctttataggttggaaaatatgtatattatgtcatgctttaggtatataatctagccatattctgtaatagatttgctgcagtttatactcaacaaccttgagtttttaagaaaacatatttgtatattccaaatgtttggtttatctttcataggaaatattagccaaaagggataccctgtatttcaggtaaaaacttagtgatagggaaatttaaaaagtgttagtcaaaaatcgaatgtttgccctatcagggttgccatgcatgactgtgctgattgtgtactgcataattccagggatacctaaaacacagacagaaatgtgaatgacacccctggggttgagcaacgcctggcagccctgattttaagtaaatagtaaagcttttgaaaatgctcattttttttttctgattcactactgaagaccagttgtgagctgcaggagggcttttattatttttcctatttttttgtgtatatgcaaggtccttagttttttcctctccatgttgtttccaaaagacttccttactgactgagcttcagcacactgctctggcattctcccagctctaagttttcatgagtcagggaaaatgtgtgcactctgaaaagaagcttgtcagacatgctcagccagctgacatgaagtccctctctccattcttcttttccatccacattcttacagcctactgcttgtacctttatttagccctgacttcatcctacctgtgttggatgttagttagagtttgttgtttacatatctgtgttccttactaccttgaactctactgcccatccctgctgtcctgctgccactgtgccctgcccttatcaccaccatagcacttagcatggtgccttgaatcttctgcttgtctgaccctcctcttttacctttccattctttggttttctttcattttctttagtcaggaggaaaatatgtattctctagatggggagaataactggaggaatgggaagaaagctcacctccgtaaaagaccaagagtggccctgcagttagttctgttacttggtcacaaccctccatttcctcatttactcttactgtggccaggcctggcccagatttaataaaacaacttgaagagggtgatatcatgaattttattc

SEQ ID NO: 69903 - DNA, 1701 bp, Homo sapiens
caaagaagaaaaaaattacccatagtcccactccttactttagtatatttcctttgtgtgtgtgtgtgtgtgtgtgtgtgtgtgtgtatttttttccgtttttttcaattaactatgctttgtgaatattctctcatagaagatactgatttgattgaacattcagatcattttcttagtctactgtgttaagtactggcccagctaagtttggaagcacttatgattggtggaatggagtggggtagaggactgctgatttagcagatgcattttttccccaagccaaagagctgccctgaaaatgggccaaatataatttcttttaagcaacctgaaaaaagtgtttcagcctagagacatactgtgactttttccttcaaagcatttcatttacgttcactttataaagttcagttttcttaggggcaaggtagcaggggcagtgggggtggtgtgggggagccgctgtgagtcttaatgcaaagaggaatgtaggctagtcaacaggaaacccaaagtgcttgatacagcacagtgacctctaattgtaccttggcatggctgctttctctttctttgataggtgttgcaaaaatataataaatataataatatatcttttttaaaaaaaacatttttctggtaaacaaaactgttgttatatgccaagacaataagcatctctgaagccaagacagtagtggtcattgctatggccagctacagcttttggccaagtcacatgccatcctgtcaacagccaaagaggtaaacagcatagatatgtgctgacctaacctcaaaaactcttgggagcacaaggaaattggcttgaaaagactctctctttttcctccttgttaattgaatttctgtctctaattaaagagacaaaaacagaaaacagtattcaaaagggaaagtcaaagaataatccccatctctggagaaaaaaaaaaatcattgaatcatcagaaatatggctgcattgattctcactctttccctgagctgtttacccattttcaggtgaggaagtgaagaggagggccaagggccaactttttcaaagggccctctctgggaattacttttgtatgtacataaatttccacaataagtatcttctgaagttttcatgcaactgagttgttctttcaaacttcttatccaatgttctaacttgaattgtgctaccagaaaatcaggtgtatcttaattgctaagtcaaagttggcttcttttggaaaccaaaactcactaacttgagcccctaaactcaccccacctccttattttttcctttaaaatacctttttccccacttcctacagtcactagtcttaggtccccttgtaaccattgcaggcagctgctgttcgaaattttaaaaatgaaatttgggccgggtgcggtggctcatgcctgtaatcccagcactttgggaggccaaagagggcagattgcttgagcctagaagttcaagaccagcctgggcaacatggtgaaaccctatctctacaaaaagtacaaaaattagcctgtagtcacagctactcaggaggctgatgtgggaggatcacttgagtccaggaggtcaaggcttcagtgagctgtgatcatgcctgagtgacacagcaagagcctgcctcaaaaaaaaaaaaaaagtttttttcattaacccgaaaactaaggtca

SEQ ID NO: 69904 - DNA, 2538 bp, Homo sapiens
ctcccaggactccctgaggccacaccccacccaggcctgctgtcttggaaaaccactcatgacttgagcttgaaccttttctcccacaattaaactcacttgccctacgtctcctctctctaagtcctactaggggtccaatttgtgctaagagactactagctggcaatggtatactattctaataccccagtcctctcaggaccacttattagccatgtgggcttgggtgagcaattcagcaccccctgagattcacctgtgaaatggggataatcattctttacaagtgaggaccaagtgaaataatttggaatgctatatacatatcacctgaattccttctcgcccctcaaccctctctttctctactaaagtaatttcagggcaacatcttctcctgcctggattactgcagcagcctccagaccacaaaattttctctgcagttcaagtacatttcatttaccatcttgcagatggtaagacatgtttacaagtcagctggcttctgaatgtgtcttctgggcattgaattcccccgactactttcatcttatagcttcagccactatccctagcacggttatctcttgcagttactggtgtaactttcgatggcactatgaagtccccattggcacctgtttatgcctctcggccaaacccctgctaagggggtgacaggggcagcatgctccagtaaggttgaagcactcttctcatggaggctcacccaagagggaaagaaaagcagaaggaaatgagggaaggaaaggtggaggctagaaagacactttggaaactgtgaaagtggccctgagctcacatgaaatgcaagccagcaaaagtgttgagattggaaactttaatgtggcccttttgagagaacagctgtagcactgcaatttcctagaaatctggatggacacatttaaagagagtgaagcactgaatggaaataactagaaaagaggcttcctcctgagctctgaatgtcctatcgtggaggagttacaagaaagagcaaagctaatagccaactgaaaacccacatgttgtacatttaaggtgatagctgggaacccagattctatttttagtcaaaaaagtggggggaacatgcatgaattgctatgagcaagaaaggccagcaaggaaagagagagaaacaagggaggagaggccagtgccagctttcaggactgacattatggtgatttttctttccctgctctgagaagttgatctggtggtcctaagttcctggcattgggcaattttccaaaagtttggagaagttactcatgaagaagaagccaactccagacagctcgtcgggaaatgtggagagtcagtgcctgggtggttttcatactaatccaggatttattaaagctcagaaagcaagcagcagagaaggtttttataatgagacattttgcaaatagagtcatcagcattttttgataggaaagaaagtttctctctgaaactttctgaaggaggtggctggcttgggaggatgggaagaggaggggggctccttctatgagtgctgtggcaggtgggggactccagcagtgggagactcattcctttctcagtcccctccccttcagggtacaaagtttttatttgcagttgggaggaattagagtcaatgatctaatagagctaactttttcctctcaatatggtatgatgtggcattggtagctctgccagatactgatgctaccaagggaacttcagtgcaggtggacttcacgttattacattgacttattcttccaaagttacatagaaactaaattgttttaaatctacacaagtagttaaagaagccctactggaaatcttttgtaaatctaaatatgcatctgaaaggcgagtaaacacttccaaaaatattttgcttgtagctctgaattttgatttgtctcctttgctgccggaacattcaagatgtataaatgttgtggtgtagattaatcatctgtccatacccaccttgattttccagaattttatattaagcagattggtttcccatcatgtaaaaaaaaaatccaataattctgcagcttctttgggactttataattttttacttaaagcaacaaccaaaaaattttgttatttccaaacacactagaagaccacatcatctagcccttgagcacagaattggccaaagtttgaatgaggggctaggccctgagcataagttgatgctgattgtcagtggtcaactcaatgtacataccttcttgggaatgggttctgtgcaaggcactggctgggtccgatgaaaggaagtcctgaactgttcaggcagcccatctgatgcagcagcaataagccctgaagaggaatagggttaacaaataccaacagtttaacgtatacctcagagcagagagagaggtctagcatggtgagggaaagtttcaaggagggagtgaattttgagctggatcttgaggggaggtcagggtttgtatacatagagtcagacaggaagagcatctccta

SEQ ID NO: 69905 - DNA, 1897 bp, Homo sapiens
gatcctttcatttcaaggagctcaaagtacttgacatcccagtctcattcaggcttgtctcatatctgaaccgctatgtcaggggcaagactgtcaaacctcctctctcagataagaaggattcacaaagaggggaagtgagttgttcaaggtcacagtgagtcaatggcagggcaggctctttgactgaggtctcccaaccctcaggcctgcacactgccttgtgcccatgcaaaggatacctcaactaggaatgtcccccacataccagaaaaaccaacctgaatgaacatcctttctgaagatagaaattacctgagatatttaaggttcaaccaatctcattttgtagatgaggaaactgaggcttagtgaactcaggcctgggattccttgtactacatcttaccatcctatctacccataaaatggtaggcccagaaacaacctacatgattacctggaaccaactaggctatcatcatcagctccactgtctggaaatataaaggctcacattggctttggccaccaaagagaggaaacattctgcaatccttaaaaactcatggccgaagggggtggggagaactgtttgagccttgtacttacaaagtcaaaagggaaaacatgtgtttcacatttgtcttgggatgggaaagaaaaacttttcctttcacttaatcttggtttaaacaaacagagagactgccctttctgtaaactcaccgaatgtcaaatattgttcactcgcatggcattggcttactaagccactacagagccacttccctcacgtaatcccctcaatccaaaggcacttcaacttgaagaggatcaactgaaataatacacatttcctctgatgattggacaagaggcagccgatggaatcaggtttccaaacctataacccctggtttcagccggagacttgaggcaatacagcttcagtcatgactcaggattttgcgagtgaaagcaagcacgtcaagtgatgtaagaaaattcccccattcctccaacccactggcttcctcctccctggagaattcagtcagacagcattgtgttgggggtgggggagaaacagaggtatcctgtcactgggtgctgagctgccggcacgcctcctatcaccattgccatggccagcgtcatcaccatcgcggtggccagcgtcagcgtttgacaaaggaagtactcagttacaattaccttcctgttggccagcagctcagataattgctttgcaatgtgtgtgagaacctcataaattaaaccaagaaacagaggggccaggtctgggctgaagggaagtgtcaagtggaggaggcagtgatgcaaggctacctttgaagtcactttgtttgtgaaaagtctgctgtgctctcttaaggaaactccactggaatgaggtttctgtgcatgtggggtttagggctattgtttttggctctgactttcacctcaagccctagctaggacatgtataaatcccataacaacagcctgacatgaaattgctcaccctctcattgcatcaggggacttttactcaggcggattttgaatgcctcattgtttaataggacaggaagtttactctcaatgtaaatgaggaatcctttttctccccgccttacctccttggaagattcttacagaggcctgacttgttggccctagtctagcttctggtctagctccttccataaaagcagctgcagcccagcagcagcctcccagtttctttattagggtaaggcttttcttaggaccaaagtttttgggcaggcttttccctagagggagtgctgggtgatgggttaagtaagggccacccagggacagggtggggttggatgtgaaaagggttggattttctcttttcagt

SEQ ID NO: 69906 - DNA, 529 bp, Homo sapiens
ggccacacggtgaaggatcttgcatctgcgtgatatgagaaatgctacgggaactatgttcagcttggatccaggcttttggaagagtataatgtccatcttcacatgcatatggggctttcatggtacacataatctgtattggagggaagtagattttggctcaatataattttggctcaagatccaaaggatctttggattaaggccatttactaagggcagtgaacttaaagcagttgtaacttacctcatccttcactcatctaacaaatatgtacgaggcctgttatgctccaggcagcaggcaccaggccagatgttagggcaataacaggcatatgaaagatacaggccttgccctcaggaagcttgcagtctagcaggccctgacagggtccaggcaggctgggttggcacgtcggtcaaattgtttcttagctaaggcatcatggtctttatggcctttgagaggcaatatgtaaatgaaagtgggggtttggggtgaggagtgggagttgagtggaat

SEQ ID NO: 69907 - DNA, 3571 bp, Homo sapiens
tgagtcttagtttttcatccaaaaagggtggttaacacttatttcatggagttgagaaggctaagatgacagaggtgaagtggccacacatagtaggtgatcaggaaagagctctttcaggcggctgccctgggccaccagaactccctggccaccattctccagggccccaggcacactggggtgggaactaatgaaatccaaatgtgaaactctaggcctttcatgtggttgctggtcagaagcacatttgataaggtgtcccggctgtcctggccgtccctacatgaagtctgtctagccaaggcatttccaggggtctaatgagaagggaactgtggttgggtgatttcgaaggtgatgggaaagacgttgtttttcatttataaagctgccagggccagttggggaaaagcagaggaaagggaaactacaagaaagtagatccaaagaaacagaacctgaaagagctccccaggctgctgcctagaacatctggaactaagctaatgggcatggagggagagcagctgccaagccatctcttggcacgagctctgagagccgcctgagggagctggagcagacgccgtgggacttttcccctgagttattgcagcttcctcctggagccggcccggggtggcggctcaaacatggaaatgtggtctgaatcctcttcccagcaaccgctgctgggcctcagtttctctctgtgaggcgggcagttgagcgaaatgaaattataatatttaattataatattgcgagtgtcagacactgcgctgagttctgcatgtggatcctcttaatccttaaaacaactccagaggtggcaatgattgcacccactttacagatagaataactggtcagagagggtgtgtgtgtgttacctaaggtcacggagccagcaagggcaccgggtgagaatttgaacccagagccactggcttcctaaccacagcgctctcctgctgagcagggacaagtactcatcttcccagctctccctgcagtcagggagccagaacaccctgggaccggaaactgctgcctggatgacctcagccagctacctcgtttcgcagacggggaaagtgagaaccagagaaggccggtgactggcccaaggtcacgttgtgtcccatatcctcctctcattcccggacgtccagctccccaacagccccagcacagagctggggaaaaatcttcagagacatccccttgggaagacagctggaaggcagggctgagccggggtcatttgtgacccagcggtgaggtgatgaggtactgacgaaagtactgtatttcccccttttgagaaacgctttggcatcagatgagtcttgggggagggaggagaggaatttggcagggatctggttataagccatctggagggtggcgtgaggaccggaaaagccgctgcccgttctgtttggtctcatcccctgaatgaggtcactgaatgtgcacgggaggctcagcgctgccccactccagcctgatggagaaatcctacccgaaatcccaaagcagggcagggacattcccaccagatacttttgcagcctttgtcctgtgggacgaagcaagggatgatgacacactcgcctgcccacccggaagtgagtctcaggtcattgcatcagaagggtgacaacctaacacaagtcattgctaagcaactctcgcgtgctcagtattcacattttcttgcttcattctgaccactacactgcacaggagccattattctcaccccccgcctccatttacagatgaggacaccgagacccagagagttttttgttttgttttgttttttgagatggagtcttgctctgtcacccaggctggagtgcaatggcacgatctcagctcactgcaacctctgcctcctgggttcaagagattcccttgcctcagcctcctgagtagctgggactacaggcacctgccaccacacccagctaattttgtattagagatggggtttcaccatgttggccaggctggtctccaactcctgacctcgtgatccacctgcctcagcctcccaaagtgctgggattacaggcatgagccaccgcgcctggcctgttttattttttgttttgtttgtttgttttgttttgttttcagagatagggtctggctttgttttccaggttagggtgcagtggtgcgaccatagctcactgtagcctcaaactcctgggctcaagcaatcctctcgcctcagcctaccaggaactggaactacaaatgcatgccaccatccccagctaatatttttcctttttggaaaaatgaagtctcactatgttgcccaggctggtctcaaactcctgggctcaagtgatcctcctgcagtgctgggattacaggcatgagccactctgcccggccaatctcagagagttttgatgaagttacaaaattctgaccatggagccagaactcaaatctaggtatgtgaggtctgagcccaggcttccaccagggccactgtgctgcaactgccaccacttcctggcacctcaagtgacacccgagcatcattcaagggaaatggcccatatcccggcaattcccccacccgccccactttcttctctgaattagggacttcggcagagacagagccccagcagcctccacccgtcccctcgtgtcggccttgctcacccacggatgagtcagttggaatgtttggacatcccagctcagcggctgtggtaccaggagctgtcaggaggcgggaatgcagagaatgtggctcactgtgctcccgcccgcccaggctgaatccgcagagaggtttggaaggtgaatgacacaatgtttgtcaagggtttgggacgacaggtgcatgtgaagatgaggacaaagactgattcttttcttggggctgccagcacagtttcgcatccctcccacacatgtccgcattccaggcccagacactccgtgccctgggctcctatgaagggcaagaaaccactgattaggaagcaagaagaagaaaaagaaatgtcccaggctcttaaaagaaagagtgtttgacctctttacccaaatgccatcctgaaacacagcttttttgtttttcgttttttttttcttttagagacagggtcttgctctgtcacccaggctggagtgcagtggcacgctcacagctcactgcagcttccaactcctgggctcaagcgatcctcccgcctcagcctcccaaagcactgggattacaggcgtgagccactgcaccaggccctgaaacactgctttgattctgtctctctcctactcagatgcctttgtgcaggccgacaatcttttctggtgtcttctctgtgcggggctgtgtctgggcactgagtagacagtagtgaagaagatgatgatagtccttccccagggagtttcctttctggagagaggttcagataattaaaaagtgagtgcgctcacgcctgtaatcccagcactttgggaggccaaggcggatggatcacaaggtcaggagttcgagaccagcctggccaatatggtgaaa

SEQ ID NO: 69908 - DNA, 1635 bp, Homo sapiens
agttcgagaccagcctggcaaacatggtgaaaccccgtctctactaaaaatacaaaaattagccaggtgtggtggcatacacctgtaatcccaactactcgggaggctgaagcaggagaattgcttgaacccgggaggcggaggttgcagtgagccgagatcacgccactgcactccagcctgggcaacagagcgagacaccatctaaaacaacaacaacaacaaaaacccagtccatttcataaatgaagactcaaaggaggcaaagcagggatgacctgtgagattgtcaggatttgcagagatgcctctgccatcatgtgccccaatcctcagcagagggaggcacttgcacactttgtagcaatcccttcatttctggcttccctgttgactgtacattcctagggagaaggattatgccagcttgttccccgcttggtcctccacaagcctcgagcacagtaggtgttcaacaaatatttgtggaaagaatgcttctcattcatttctctgtttgatcttctcccacactcctgtgaggtagcaaattaggcaatatgattgctgctgctgttagtcatctggttagcaggcgagatggggtgacttcctctgggtcacacggccaggacctgctgagctggtctcaggctcctggctcccctcccaggcctttccaaccctgtcatgaggaccttggctcctgtgcttaaaaaacaaagatattaattgggaggaggaagcctttgagtcattaccagcaacaataataataattacaatccttctccttgtaacctttacctcatgtaatccccacttccatagcaccagcaagggaggtgctattattatctctaatagattgttctgcagctagacagagaggttgagcaacttcctcaacatcacacagctacgagcaacagagcagagattcagaccccatctggttccagagcccataaaccacaagttacaaatattgtaatcccaagtggcatcctccaccgcacccagacagactcacagcgcgtgtgggctgcgtttggtgagggagaggctgaatggaacatccatgtattctctcctgcattcattcattcactctcacttagtgagcattcgctgaaacccacctgggcgccctgccaagcgtctggccctaggacacagcaagagcaggatggtgccctttctgcccccagggaggctttggccaggtaggaaaggcagatatcactgtgcaattcattgcttcattagagcaaagatgagtgccaccggggaggagggataagcctctgtctgcctaaacccagggtggggaaggctgcccctcagagctgccatctcagtggcagtttgcggatggcaggaatcagggaactgagggtggagagcgttccaagcgcctggaattccatagtctgggcaaaggcttggatccgactaggatggaaagatggccggtgtagtcggaactggtgagagaggaggagaggagtggggatgggggttccagggtaggtgggccagcactgtcctgcccagtgtccaaaccctctcagacagaactaaggctgcggcgaatgtcttcactttcactattatccttaaagagtaaacagg

SEQ ID NO: 69909 - DNA, 4060 bp, Homo sapiens
gtcttcctggggcctagtcttcactctgtcactgcgtgtgtttctctgtctccctttctctaccttagttctccctgctctcttctgggatgacgtaaagatgagggcaagacacaagccatttccacccaaagggtgcagggtccaggagagactcccagccatcccaccctttccctcaggaaggcaaaggtcctaaggccccctggccctctggctggaaggcaccaggccccaggcccagcaggcaccaggagaaaggagacccctctcttcccacctcccgtggtggcccaggttcctcagcagcgcttcccactcactggcccattgcagcccaaatctccgaagccaggcacccatgggggccacggggcatgggggagtggggaggagtcctcggttgaccctcatctccctcccaaacctgccacttgattctggctccctgggccaattgcccccaattctgcccccgcccccatcatcctctatctcttccttccctagtgtcccctatctcactcaagctcaccccatttctgcctggctgtccccactctccatccccaaatcatcattcaaaactctctgttcccccagctccggacagcccctgactccatgccttctcccgactcatccgctgtcccttgtcccaggggttcccctccctcctaacacacacacaccggctcagggagggagaggaaatggtgcaccaggagagagaaaaggcaaaaggtcataggcagtcgggtgggcggggaggaaggaaagtgaaaggtgacaggagagctgggagctgtcccgacatgtcctggtttgcccctcccccaggggggcctgttctcccgactccccccaggcccccttagacgcttttccagggctctgcagaagggcacctgaagatggtgggggccggggtcagcgggcgagtgaggctggagacctcccccggatcccccatgctggaacagcggggacaggggcctcctcaagttcacttctcctgggtcccctgttcgtcccagcatcccaaggcagtgctgaggccccggggtggctgcgggaggggggccacacccctatatctcacctagcgcagaccacacgcttccagacaccagcagatggaggcggcacctgctcccgtcccaggccggagtttgcaagctgctcgccgcccgcgcccctccctgggagcagcccgggaccgcggttggaaaggagaaagcggaaagaaagaaagaaaagaaaaagagagagggagagtgaatctgggagaaagcgcagagggaagagcagccagcgagtgtccggagcgaggaggaggaggaggagaaggagagggggaagaagaggaggaggaggaaggctcggcgccccctccctcgccgccaacctgccgcggggcgtgcggtgcttgggaccatgtgcccgcgctcgctccgggccgccacccagcgcctccggtggctgcgcgggcgccccaagtgttcgtgtgtctgcggcgggtgggcgtccggctcgcgctgccaagcgccccaagttgccgccgcgccccgcagcggggacgcgaagccggcgcggggcgggtgtatttacctgccgccaagaccttcattatgggctgcacttcagagggccttggaggaaacctcagatgccggcagttttcagaggttcatgctcaaatggggaatttgcctgatttatatactggagcctgtgttgtaagacagaaacagctatatttagccgggatccccagtccaggaagttgtttgaggtgcatcataggaaattatgaatggaagaaagtgagagtgaaggggggggacgagtgaggggggagggtggggagaacagactttttccctcttctaagaatttgattgataaaattataatgaagccttcgacaaaacgccctgtggttttcctgcctggcttgtcccgggagttgtctgaagatgggcatcgccaggagggggcccctggccgagtcagcaggggtcccagcagtgggcgccccagacggccctgactcacctgggtttggggaggtagcgagtctggactagcagatggagactggcccctgtgccccctggttggggggctttaggggggcagtgggaggaggagggctagggcttggctgagaaggaggctccaggaggaggggccggggccggcgtggactttagacggtcataaagtggaactgaacatgggcgctggaagccaccccagaggtagcctcctccaatctgcacattgccactgggccccaaggggctccgaggggaacacgttgcccagggccccagagggtcaggcctccagacaccaccagtgcactcgccctgctgaccactgtacctgtgaggctggggaaggggctaggaagacatgggggtaggggtgactgactcagttctgtcgggacactctgggaaggtgcttctgggaaggcggtccagcatttccattctgaagcaggactgagagaggcttggcgaaatcgtaccccagtttcctcctccgggtgctgattgatggttggggaaactgagaagtggctggtcccttccagacctgccttggaagcccctttgagcccagcctcagagaatgatggaggtccccaaaaagtgcttctagaggctctaaggcagtgtcacatgttctggcgtcttctgaggccaggcgatttgtgaatgaggaagggcagaaaggagcagtggggagccgggcaaaatgagcacagggacacctccaagaaatgcaacagaaaagtgaaaataaatacaccctatgagatgcgggaatgccggccagacagcatggccacgcgtctggggccatgccgtccctaaagctgccaggggacccccagtaccaggagatgatttagtcccctgtggccccttcccagcccttccgcctgaccctgacctgagatcaaggtgtgtgagttggttttccaaggccagggagctcttgcagcctcgcccgggcccccaccgccccctcgcccatcctccatgcccccagttcctgcctcttgccacatcccagacctgcccagccacgggttcctccttcatcgtgccaggacgagccctggtgcctgctgccgttccccaccacacacacaccctgctttatctacgctcttgccccccattctctcccagcagggcctcggatgtgaggtgataaaactgcccatcccagctggcacttcccgaactggctctccttcctccttcctgcctctcaccccacaccttgtctcttctttgagggaccatggagggccccacttggcacttactgctcctatacacttgctctggggtcagcgtacactactaggagactcacctgccctggcctggctcaggtaaccccacatcccaggacaccccagctcaacccttcttcttacacctcccccagcatctcctgcacaaggacctgaccactcagagcacgtgagctctggaccagtccccagtcccatcccacatcacccagacccctgccacctgactcagcctggctctcctgacatggaccccaaatccatgtgaccaggggctcactgtggcctccacccatcaaacccccgtcgcccggcctgagtctctcattaggctcaagagttctgcagctgcccctacatctaccattctgcccagtctcccctgcatccttccaagcggacccccaggcccttgcatgccttctggcaagccagaccccacatcagccctataatccacccccaatcgctgtttaatctcagccccaccccacaggaaacaggaagtgaggacagggtctagaagacactgacactaaggccccttaaccccagccctgactggcccctccagtgcctcagtttcccctcctctcacggtacctgacttggtttgtgctccccaagtgctctgggcccctcggcgccccaggcccagcctccccctcctgtccatgtccaggcaccacctgctctgggcctctggagggaaggctgggc

SEQ ID NO: 69910 - DNA, 1470 bp, Homo sapiens
ttcacaaccaggttggaggtttggctctgccagttatgagctgagtgactttggggaagggactaccacctcctggcctcagtttcttcaactataaaatgggaataatggtaccgcctttgtgggtctgctgtgagggctcagggctcagcatggttctgggcacccagcaagccacctgtctgcatatcatcacccattgtgctgacctccctgtgaagcaggggttcatttgacagatggggaaacttgggtccatgccagggtgctgagcggggaaggctgggcaggagcaagacctctcaagcctctgctgatggtaaattgaggcaagatacccacgtagcctccagcttcaagggtgccccagataaatcagacaggttgtgggagggggctggcagggcagtgtgctcactcccccagagcccccttcctggcccctcaccacccccaccccaagcctgatctgaggacagcagctgacctggccttaccgcccccagaagctgattcacccccaggccccatgtgagaaggaaggagacaaactcagctctgaggggcttgaatcaccagccgccccctgcaaagccccggggttgggggggggatgcgggggtgggggccagccccctgcctgtctgtctctttcctggaccctggggctctcaggagagagggcagcatgtcagtggcatgggcaggggtgagatgggaggtcccttcacagtcaggcattctgtgtgggcagccagcagcagttactcaccaggtaagcagctctccgggcattggggaattccccaagaccagcgacccagaaacagcgctccgggcacccccggctgcccaggctggcctccctccttccttccccatcccctctggccctggtacctggaaaatgagcagagccctcaggtgggcctaggaaggaagcggggggccagagggtgggtcccaggctcagggctggtgaggagtggccagaggagatggtgaagctcaggaatgccgggcacagcccagccaattgggcatcctggccaaaaaggcaagagcaccgcactcttcaatgcttgaggagtgagagtgtgatgccaccagcggaccgtgcctccactgttctcaccccagtggtgtgggttcaaatccctcctgccccaacaaccagctatgtggcccgggacaacgggcttcctttctcataccctcggtttcccctctgcaaatgaggatgctgtcataacagcctcgtggggccatcatggggatgtttcttgggaaatgcggataaacgtctaacacatggcagcccttctaataagatctggttgtggccgcagaaggagctcaaactccagaccgagtcaggggcttgggttagggctgggtcccatggtcagcacactggagtccgagagtcagggcaggaggtggctcctgggtccgcttagttcatggagc

SEQ ID NO: 69911 - DNA, 454 bp, Homo sapiens
gaaagacacccaatcacctagcccggctccaaaccacgggctgcagcgccccccactgcccagcgggcagcaggccctgcggccacggccccgccagccccaggccagcctgcagccggggcctcccctagagctaggcgggatggcatttggggatttgaggaagtgagccgggatgcctgagactcagaatggagagtgggcagatacaggccaaggctggagaagggggcaccactgagggggtcttggaggagcctatgccatgtccagcacctcctggggaagccctgaggaccggccacaagggggtgccaggaccacgtgcctctgcctggcggagcctctgggaggaggaagaggaggaagggggagaagaatttctctcctggccctgctgccgcgtcccacttccctcagacttccaggacgtcctctctccccagcccccatt

SEQ ID NO: 69912 - DNA, 901 bp, Homo sapiens
agaactaggggtcgggagtggatttctctccatctgccccgagacacccccgcgaccctgggccgggcgccttcttgccctctcggcctttaatttccaggccaatgggatgttagccccatctcgggggttgggggctactttccggcctcccgacctctccaggaaccctccacccctccactcctggagggaggagaggttcacacccgcggcgacagccccaggggcgtcggaccttggaccccctagtccagcccctctgacatgaagggaggcgtcctggaaggagctccccgcagtgaccaggtaggaatgcccccatttgacactactgagttaagcattgcccatcccaggctgtttgcgctttgcccctgggagggggcctcacggggccggataggcggcggtcccccaggccggatggcggccggacggggagagtcctccccacccgctcccgcccgcctgcctgcctgccttacggcgatcctaatcctccgaccctggcccggagcgagagcagagcccccagcccctatctgcgctcccgaacccgggcgcgcaccggctgcggcggggcaggaagagcagcttgatgagcgggtgggtgtagagccagagaccgggacgggcgacgctcagcacccgcacccggtgttctaggatgtgcagctccatcgcggctcgcgcggacccgaccccgccgccaactagacccaggccgcacgggaggcggggcggcgggggtggtgcccgagccttaaaggagccgctgcgctgccgcgtccacgccgcccgctgcgaggctgacccgcccagccaggcgcggcgtccggctccttgacggccacgccccgcgggaagagaagcctattgggtggtcacgcctcctcct

SEQ ID NO: 69913 - DNA, 5038 bp, Homo sapiens
ggaacaggcttagccatgctgtgccacgtcatggtccaaggcagcagtgacactctgctgaccccattctctgtaggttcccagtttcctagcgttctcccaaaacccagaggcttgaggcttccaaaagttcagaaggacaagactgcttcccaggctactgagaccaagggctggggttctctcttcccttgtccttctagacatctgctttctgcccaagcacatctcagcacctctggctaggcaggttcagcaagggcagtgtccatgctcatcacctccttatcctagcctgtcgtgggagataaatcttgataccaaggaacccgtctaaaccctcctccaagcctcactccctgaaccagcccaaacaaagagaaatacaccctaagcagaaagtctgaggtcacagaccacaggactgatcctcctctcacccataggggaaaccaggtggggtgtaggggagaataaatagagtggggacttgaagttagctgagctaggtactccagttctgccatctactaactgggagaccatgtgcaaaaagtgacaacttcttcatctttcagtggggtcataacgcacacctcatctcttatagggctgcaatgaggaataaatgtgtacaagggcccagcctggtgggtggccagcaaatggtagctattaggtgactggtatttgcggcttaactagcaatttcacatctcttttctcatctgactggtccccatacacaggcctttgaggaaggcagggcatgattaccaccattttactcatgaagcaattgaggctctgagagattacttaatttgctcaatggtaaacaaattctaactcctggccgctgatccaagctctaccgctttacagctgtgtgaaacagggctggctgctttgctctctgagcttccagttcctcatctgtaacccaggaggaatgccacctcctcagagaacattggtaaacatgatgtgaggcaattaagagctgacactttcatgcgctggccgtgtactagctctgccaagcactacacaggcacacaatcccccaaggaaatagctttaattatctccatttaatagacaagaacactaagattcagcacagtggagtaatatgcccaaggttacatagcctggaagtagaggctgccacctgagcactaaactatacaagacatataaagtcccccgctcataccatggcttcaatccctgtcacattcccttccctcttcttatcaccctctgtgccgagaaaggcaggggtgaataacgtgaaaaaaacccctcacacttgggtctccaggatggagaggaggcagttggaggaagtcccaccaaagtgtggaaaattgggaagtggatgtgcagggggagcatggccaatcaccgatccagagggtttccctctccacccagagcctgaaagtgaagtgaggacaaacaaaaggctgacctgttttgcatactaggcaacaacctctggagttcactaccctaagaggtggtaatgaatgaaggtataaatggcttttagaccagttccataagaagtgatgatgagaaaccaaaggcaggagagggtaggctggtggtgtgcaaatggctgtcaggactgggaaacctatgagatcatgcagtgaggccatcccctccccagaaggtaagcggtctgcctgacgccacacactctgtgagttggtaggaaaaaggaagagggtctgcagcagcctggcactcccttctggggcccggccacccctgcctaggagccggctggcagtgtccaggctccctgtctgagtgagagagtctggcttgcttcactctccctccttcccaatgcaggctaattctggggctgcctgtctttcccatgaggaattccctggctctgctccttctagtgctgggtcagtgcacaatggtaaacaggttctctccacccttcactggccttggtgccctggacctctgcccagctctctactctgctcagctccaccctactcagtgtgagaaatggttcctttagcactagccttgctggctcccaaaaagaaaaaccaaggtatctaccttcctctgatgcactcatctagggaagggcgtagaccacagagaaactcccaagcagctctccctgacaactgcagaaaggtattagatagggtcttgctctgtcgcccaagatggagtgcagtggcatgatctcggctcactgcagcctccgcctcctgggcttaagccatcctcccacctcagcctctcgagtagctgggaccataggctcatgctaccatgccccactaagttttgcattttttgtagagacaaggtttcaccgtgttgcccaggctagtctcaaactcctgggctcaagtgatctgcctgcatcagcctcccaaagtgttaggattacgggtattagtgactgagtgccgcctgagactattctcaacagaagacatcttttctccaaatcccagctcctaccaggcagagtgctgcttgaaattcccttgctggtgactgagtccttggatcacaatctcactgcaggcacccaggggccaccctgactcatccttaccaaactgctagatctcattgatagatcttaccaaaattagtcttgactcactgtttatataaggcccctcctctgcccagactcgtccatggctccctactgccctcattatccaacagaaacctcagaccctgtagctgggcattacggcacacgccctgtcatcccagctgctcgggagactgaagtgggaggatcacttgagctcaggagtttgaagctgcagtgaaccatgattgtgccactgcaccctagactgggccactgggtcacagggcaagaccttttctcaaaacaaacaaaacaaacagaaaacaaagaacaataacaacaacaacaacaaaaacaacacaaaaaacaaagaaacttcaggccctggctctcaaggccctcctgttcccctgcacatccctttctcccctagtcccatctctataggcccctacccctgagccatcttccttcaacccccattcaattttggtgccatcatcttgggaagcatcattccaaactccttctcatctctacaaagcctctcctaactactccagggacagaacacaatcaggccctcattatattccatgcacacctttctagagcctgtgttccaggccctgaatctacaaagatgaataaaatgtggtccctgcccttgaggaggtcaatctggcatcaacaaacaggtaggtaaataactagcacacagagaagaagtgccatcacaggagcatgtagaaggggctaggagactgcaaaaagaccccagggtgaggacgggctgtttagagaaagctttaaaggggaattgacttttgaattggggtttgaagggtgacaggaagtagctaggctgagaaaggggaaagaacacaccaggcaaaacactcagtatgttcaaatgctagttaataggagagggaatggcttgtttggggaatgtgagcagtccagtgggacaggtggagcttctccacctaagggctgttctgcagaggcagcatttcatgagaaggcgcgttcctggagggcaggggctctcttggcctcattctctgcagtgtgtcccaagcctgatacctagctggtgctcaataaatgtgtgtgtgtgtgtgtgtgtgtgtgtgtgtgtgtgtgtgtgtgttgttattgttgttttgagacggagtcttgctctgtcgcccaggctggagtgcagtggcgcaatctcgactcactgcaacctccgcctcccgggttcaagctattctcctgcctcagcctcctgagtagctgggactacaggtgtgcgccaccacggccagctaattttttttttttttttttttttttttttttttagcagagacggggtttcaccatgttggccaggatggtctcgatctcctgacctcatgatccacccacctcagcctcccaaagtgtagggattacaggcgtgagccaccgtgcctggccaacaaatgtgtgtgttgagtgattcatgagcttggtgacctcagacactctgaatttcattaagtgttgtcagcagtgaaaagggaatatgctcctctaccttgatatcaggtgggtaaagcatagtaagaacttgataaagagcattccctctctggcctggtaccagctctagatcttcctcaaagcccagcacagggctgagcacagatctgcttgatgatggcattttataacattacaattctaatattcaattaacttaactgaatgtctgttataacaacagacgcttgctatgcaccagacactgtgttcagcacttaacttacattatttcatttaatcctgacaagcccatgagataaatcctctaattatcaactcccttttgtgaataaggaaactcaggttcttcagaaagacaataactggccaaagtccaagtcaagcaggggatggcactggaaagtgaatccgggccctgctcatctctccctctgtcactcaactccaccaccaagtgctgtccagtaggctgggtatacacagccttgctcctgaggagcttggagctcagtggactcagaggcacaagctgtgtgatgcttggcaagtcactttgcctctctgggacttggtttctgcttcttaaaatggggactatgatgataaatactctcacagaattaaacgaggtgatgtaggtgaaagcctcgtccaccatacaggctcctctgtgaaatggcattactgtgactatcctgggaggatggagggggtcactcagaagcagaacaggaagctcaggatgaaagtctacatggtgccaggcacagtagctcacgcctataatcccaacattttgggaggcagaggccagaggattgcttgaggccaggagtttgagaccagcctgggcaagagagtgagaccctgtctctacaaaattgttttaaaaat

SEQ ID NO: 69914 - DNA, 1015 bp, Homo sapiens
ccacagaggagggtggtggtaattattaagcaaactcagactccttccccaagtgactaccaccacccaggaggacagaggccccgggcagcactctggttgcaagccttgagtggaatctttcgggatgcccacctttgctcttacttctgcttatctttacagaccaaggaaagggaaggtcaggccctcagatcacagccctgctccagatgactcagcgaggaactcatggggggattcccaacctgccctggcaggccaggaagctccagaccacaagctgagtgggactggctcctgcctaacctccacggtcgtggggtaggttggaagagcacgtgagggaagccagattttcaccccaaagctgcattgctcccttaccattatgctaaatgtctgaggtaaaatctcagagggtaatttacactcgaattgtgagagccgccatgttccacagagcccttactttgtgacagacactgtgctgggtgctttaccaacaacatctcccttaatcctaacaatactcctgctcccaatgccaccgccacacccagctaatttttttgtatttttagtagagatacagtttcgctatgttgcccaggctggtcttgaactcctggactgaagtgatctgtccaccttggcctcccagagtactgggattataggcatgagccacagtgcccagcctaggttctctttctttgtgaagccaagcgaagatgaaagggaaagcagcagcattctccaaaagtggctggccgcggaagatcgcttctggactcacagtgtccaaggcccaaagcactgagtagggacaggagttctccgaacttatgctccttcactgggtcactcacgacccagctactcctgccttgtcttggggtacatatgaggagctgtgtgtggagtcctgggacaggaattgtgtcatccatcatgacaacttagcaacaaaaacaacctgaaaagcctggtaggagaagtgcagacacttggg

SEQ ID NO: 69915 - DNA, 1496 bp, Homo sapiens
ctctacaaaaagtaaaaaaagtagccaggcatggtggcttcagcctgtaatcccagctactcaggaggctgaggtgggaagatcgcttgtgcctgggaggttgaggctgcagtgagctgtgattgcaccactgcattccagcctgggtgacagagccagaccctgtctcttaaaaacaaacacacatacacacacacatacaaactgcgtagtttttatgtggggaaaaccgaggttaaaaagattaagcaacttttgaccggcatggtggctcatgcctgtaatcccagcattttggaaggccaaggtgggtggatcacctgaggtcaggagtttgagaccaacctggccaacatggcaaaaccctgtctctactaaaaatgcaaaaattagccgggcatggtggtgggcacctaaaaccccagctactcgggaggctgaggcatgagaatcgcttgaaccggaaggcagaggttgcagtgagccaagatcaattgtgccatttcactccagcctgcgcaaaagagcaaaactccatctcaaaaaaacaaaacaaaacaaaacaaaaccaagattaagcaactttctcaaggtcacacagctagttagtggctcagtaaggcatagggttaaggtctccagatctccgttcagcagtatttgtttacactatgctcctaatccaattatctcatttgatcctcacaatcctttgtatacaaccacacctggtaacttctttctctttttaaaattttttttagaaatggggtctcgctctgtcacccaggctggagtgcagtggcacaatcacagctcactgcagcctcaaactcccaggctcagcctcagcctctgtagtagctaggactaccggcacgtgccaccatgcccagctaatttattttttagagacagggtctcactatgttgaccagactggttgaaactacttgtttaatgtctgatttccctgtgagggcaagatcaggtctatatcctgagcctagcacagggctacacatatagtaagtgctgggtgaaaaaaactggaagcattagccccatggttgggtgagggatgtgcctaagtcacatattacaaaggtcagtggtggagccatcactgacactctgaccctgtgcctggttcagagccctttctcaaacactagcctaaaatccacatttccagccagaatctctcatctccggatgccactggtggtgccccttgtaagtgctgaggggtttgccttctcacaggttttgtcccagccaaggcaccacctctaagaacagaataaaggtgctaggtgaggtcaaacaagcctccagttgccaagtgcctccccttgatcagtgtatgctgtgtccaaaggcccaaacccacccttcccagttgccataccaccctaaggtaggttttccatgtcctcaggccccagtcctctcttctggttctccttgcatccttccttatcatccaatatgtc

SEQ ID NO: 69916 - DNA, 1005 bp, Homo sapiens
gggaaggggtgggggcggggcagtcagtcctgaagtcggtctgaggtctcctggtgtgggggcagtgaggcggggagacaagggcgtctgtgggtttgtgggagggggaaagatggagaatgagtgtctatggaggggggcgccagccatctgggagcctgtcggggtggcagaaacaatcatccctaaggtcttggcggcaggggtgggtttggggcagtctgtcattctgttccacggctggaaggagggcacagtcggtccttcctgggagcgggtcagtctgtccggagggtggaggtggcgggtggaggtgtgggcccgtccgccccctgggtcggaagtaggactgcgaagggggcgggtctaggaaggcaggggtggtgggggtggggcaggggagggaacggggattagtggtccctgcctgggagggggacgtgtcggcaagtcccgagggcgcctccgtccgtgtcgaggcccctcgcgtgggtggcgcgctcagtcccgacccccggcgctactcacgcgccctcggcgccctgcgagcccacgatgaagccgaacttgtcgatgcggcgctcggcgaagccgttggcctccgagtcagacccgagagagctgagttcgtcggtggttgcggcgtcggggccctgggccaggctctcccgggttcccgacaggctttccccggccgcgggcgcgcgcggcccattctctccgttgctcttcgccatcccagccgcgcccgccgcctgagctccagcggccacctcagccgccctgctgccgccgacgccccgcccacgcgcggcgcctattggccgccgcaaggccggggggcggggctccaggcccaccccggagctctccccccacgcccaatgggcgccgcggaccccgggccccgcccaccctcccccggcgggcgccaacaagcccgaagtgagggggcggggcagccgtcaccgcagccctccccgccctcctccgggctgccaatca

SEQ ID NO: 69917 - DNA, 1254 bp, Homo sapiens
ctaaaagaaatttacctctcactcttgtgggcttccctaccttaatatcccttctagcccagcaaacaatgttcattagatttgtacctgaaacttctatcacagggcatatcacaccatactacaatggtttgtgcacattcgagattggagagctttattaagggcgggctggcactgtatcatcgatggccattgggacaacaaacatttggtgagcattctcatatgtctgtcttctcgttagcctgtgagctccctaggcagggaccatgccccattcattccggtaatgtgggagcctggcacggtgtctggcttggggcagacaccgaaatagatgctgagaattaacatccaaagatgtaccgtgcaggctgggaaattagccattactggggaaaggctgtggccggcggccccaactgctacataagatcagaggatgggctggatcagcgcctctcgcacttataaatcaatcaccttaggattttgttcaaatgtagattcctatttaaaagatctacggcggagactccacatttctaagaagctcccggctcgtgccgacggggctgctccgcggaccacttagagaatcccgttcagggtggctcatttcgctaccagaacaccaccatagcgcgggaagcgcgcagcctcttgggacttgcagtccctccaagcccttcatagcggccggccgcttattcctgtgcgagtaaggagcgcccaggccaaccctccggctgcaggctgaggggcgggggagaggtacctgtttgggctccgtgggcacgggcggcggcgggggcaccgcctgcacgggtccggccggcatgactgcgacgctcagggctgccagtccgcctcggtgtcggtgagcggtgccgcctcaagacagcctccccgctcggtcagtacgacgagctcgcaagatggcggcggccgagcgagttgcggccgcgaaggtacgactggcgcacttccgggaccgtcccctcgccgtgacgcgcttcccgcccctccccgcgggcaccgcggcgtccgacgccgttgccaaggcagcggcctgagcgcccggctagggcttttcggggatcccggtggccgcaggcgcaccgggggcagttccgggagccgaccagacacgaaggctgaagccgcgacgccgaagacaggtgagatgttgtacgtcacccgccggacccccgccgcactcacctcgcggctcctttactccacaggcca

SEQ ID NO: 69918 - DNA, 1484 bp, Homo sapiens
ccccatcccatactctcagagcctggtcaagcttctcaacctctctctggcctcctctcacctccctgcttcgaagccatactgactccattcttcaaactggggtgccctgacccaccaggcctagggcttctctgcaagctcttaagggcccatctaaggagggcctggctctagcagatgccttggaatcctttcctccagccccctcccccatagacatcccctgcacctgctggaccagggccttgggataggcctgcgggccactgcccttattctcctggtggaactgggccgcctgctccttgcccacgtatgccactgcaatccagccttccactggtgcctcctgctcggcatccacgatgtccatctgtgtggcaaggggccatgagcagagggaggtagggtgtggtgggggagggagccggggtcatcacagtggatgccaaggccagagttcccagagcatctggctctctggtttgggaagccggaatgctgggggcctggggagcctggggaggggcgctggactctcaaggcttggtggaggatgaacgtcggttcagggtgcggggtctctagggagggttgagagaggggtttagtgatgcggccagatggctcagcagcgctcaccagcagcagacgaccgcccagcaggggcgccgggtcggcttcggagccgatcctgacgccctccaggaccagagcgtcctggcgcggcagtctcacgtccacccgcacggcgcgggctccgccccgccccgccccggccgccggctcgctgccgtccgccgcggccccgggccccgccaggcccagccacagcggcagcaggggcagcagcagcagcagcggagacggaggcggcggcggaggcggcggcggcgatctcagcgcggggcgagcggcggggcccatggccggacccggcgagctggcccaacagtggggccaggggtcccgggcgcgggggggatcggagggagcgaggccgctgccggacggggcggggcgccgggaggggcggggccgcggccggacggggcggggcaccaggaggaacggagtgggcgcttggcggctctcgcgcccagactgggccgcgggcgccccctggtggccgcggagagctcaggtgcccgcggctgagggagctggagaggggcaaaaccggggtcgcagcgggaaggcggaaagtcagagagaggaggtgcttcggcagcggacgcgtcagcggggcagacaggaaaatagttggaaagggcgacctgggggagcagagacacgatcagagcctgagaagggcaggagcaagggatgtctaaggggcctggtggcaggcccttgttctgcggcagccccgtggacccacggggtggccagggccaagtcacatccctctcttccccggtcctccctgtctcgaccccactaaacagcaggaggcagagaaccagagactggcgtgggaa

SEQ ID NO: 69919 - DNA, 1255 bp, Homo sapiens
acctcagcagtggaagggggtggtgatgaggatgaaatgttttagaattggtaccaggaatggggtgtatgacaaggcccttgaattccgtgaacctgagccctctgcttctcttcctttgctgtgaaatgagttatttggtcacacaccaggctgtgcaaatgccaaaaaaaaggcattccgtgagtacacagatggtggtgctggcagaaggatgaagggcagggaaggcaaatccacatctagaatatgtgtctattccagtgagcatgaacctgggccccacctatgaggaagaggccaatgtaatcaagctgccaccaggtggcaggctggtccctggggaatgtggccacatggggcccagtgactttgttttgtacaaaaagggccttgaagcagacaatgcctaactcatggaaatgtgtcaccatcagtgggggcttctggcccagtggccacagggacggctaggcctgaggtggtggtatttttagaacatggaggtccctaagattcctttaccttatggacatgaggcccagcacataaaacaagttgtcttagaagatcttaaagtgtcccttgattgcctagttccatctgccacctccctccactcacccagatgctcagagggtcgatgactcactcaagatcacacagggcagatgcaaagtagccgcagcttaactgtggcatgggctgtaaagtagagggggtcctgctccttccttgggtccagctctcagggacagggtgagcgtcatgcccacaaatggatatcaaaggacttctcggtgctaggcactgggcatggagcagtgaccgtgaccagcaatggcttctgcccttgagaacagagagaaaaccataaccacatacacaagcaagatcatttcaggccacggtaggtgccacaggaatgagataaaatagcctcagagaggggctgggggccagaggccacttcaacctcattaccagggaagggagacctctctaagaggtggtgtgtgggctggcacctgaatggcaagaatattcaagagaagaaacagagaatgcaagtgaaaacagctgataccagctgggtacagtgggtcatgcctgcaatcccagcagtttgggaggccacagtgggaggatcagttgaggccaagagttcaagaccagcctgggcaacatagtgagacccccatctctacaaaaagaaacccacaaaaaatttaaaaaaacagccaatagctttaca

SEQ ID NO: 69920 - DNA, 1388 bp, Homo sapiens
gtgggcccactcctatgccattctgctctgagaggtcactggtgtgggaacaagcttgcctaccgaatctggactctattttagctctatttggggtggaaatggcaacccatccttcccaagcgaagtccccaggctcctgccagctagtgccagagccatagcaggggccccagcacccctccggccctcccctcccctctgggggactcctgaggtcccagctccctgcccccagcctctgtgctcacagctatctgggccacctcattctaaagggatttggctcttggagacaactggagactggtgagaaagggcttagggattagacagtgatacccaggaaggtaagggacttaatcaggggttcgagtgtgggaagtggggtggggagaggattttgtttctttgcaaagccaggctggactgcagaagtgaggaggaagtggggctcgggggaggagccagacaggcttagtttctcactctctgttgtgccttcagaagcaacatgatagaataataatccctcacctgtgtgcgcccaccacttccccagccattatttcacttggaattctcacagtggcgggattagttctctccccagatcacagacacccagaggaggcaggtgacttgaggcagctgcaagccccacagggctgggctgggaggaggggaggaggttggggccagggcttttctgcatggctgcccgcaggcacaagggttttccagagagttcgcgctgccctggccccgtggaagtagagtgttccacaaatatttgtgaagagtttaaaagactgttctttccaactctcaaatcacaatgccaatctctgtgccacccccttccccctggcaccacagattctgaggccagggcacgcaggaggcctctgatctcaaggccagtgccctcattttagtgaggaaacaaccaaggtctagagggcacggccagcagccctgaggagacccccaaatatgcgtcttgtggaatagtcacggcagcacattaagcaagaacatggtctccagcccacacaccagactcccggtccagtgctccttcctgtgcccagagctgccccccagaagaatctgaagcacagggctctgtcaacgctaggactgccatcccaacgcttctagatctctgcgtgccaccagccttctttaagttgttcacactctatgttcccctaagcaaagtccccagcaagatatacccagagcaacacacccatcacagaaggttctcccctccagcctgcctgacccaggaggcctggttcttcctgttgggccatgctattccctgagagttgccactacaatgcaaaatagtccacatcaaggccaggaaaggggacttc

SEQ ID NO: 69921 - DNA, 3063 bp, Homo sapiens
cacctgtaatcccagctactcgggaggccgaggcaggagaatagcttgaacccgggaggcgaaggttgcagtgagccgaggtcgtgacactgcactccagcctgggtgacagagcgagtctccgtttcaaaaaaaaaacaatgcaaaaacaatccctgtgtgcaggatgctgtgctgtcctgcactatgcgagcctggttagaagagctcattagatagcacctttcaatccctccttgttcagaggcccagagagctcaggtgtctcttccaaggtcacacaatgaggtaaggataaatttggaactaaaactgagactccctgcccttctgatgcccactggcctcagtcccagtgggcacacttgctcgcctcctgcctgggtctctgacttcaggagggcggagggggcccgtgtcagagccttccgcgccccagcgcatcgctccctactccgcctctcgggatcctttaagaggcggggcttggctgccagctccgcggcccgggcaaaaggctgggactttactccgggtggcggcgaggacgagtctgtgctccatcagctgccgcacccgccgcctcccgcccccaaaccccatccccgcggttgagccacgatgagcggcagagtcggcgatctgagccccaggcagaaggaggcattggccaaggtgagctgtagccctggcccgggctcccgcctcgggctgtggccctcgccctcctgcggcagcgagaagggacggggctgggtgggggccgagggtccgtggcgggcggcggagggaacagaggcggctgtcccagcctggcccgcgcccgcggatggctccttcctccctttgccaccctcgaggtcccaggaagtttggccaccccccgcccaagctctgagcagccgtggcggtgccacctggggacaagtggttgcttgtgagtccccggaggccgctgagggcacaaaggcaacattcatcctcgggactggcagccgggccctggggcaggggcaggggcaggggcccaagtttcctcccatttccgggaggctttcttcttgtagggtcagtggcacgatggaaagggctctggatagctccttgggagacttggatagctcctgccccggcaccaagccgctgtgcgaccttgggcaaaaccctgcccttctctttgctcctcgatgccatggaatgaggaggttggaccagatgatgttgaagggaacacctccgtgtgtgaattccaggctccccccatgaggcactgggttggtgttagtttgagctgagaccagccgtcccctatcttgcatcccagacccctgcctggttcaggacttaaggtttatgctcctcagaaggcaagaaggtgagcctggctttgccttggcatctgtgacaaggagggggcaacagtttgagggcgggaccttcctcttcacgaactaaatctcttatctgtcacccctggggagtgaggaggtcggctcttctctgggcaagagccgatagggtctggccccaagatttggaggctccacagctggggagttttccatggctgggaaaggtggggcggggggcagatgtatcctgccactggcagcagtggggaggcaccagctccataaagcctctgtcccaggctgggcctcccccatcccaggaaggctggacagggaggcttcagattttactgctgactcgcaggagaggtcaggcagagaagggattaggtggtgattaaactggagaccaggggctggttagggtccttggagaggggtagcttcatgcctgcagtttggaggagcagtttccctggtgcactgggagctgctttgtggggtgggatggtctgagtccctggctgacctaggcaaggggcagaggtggccagtcctcattagtgtcctctgggactgccctctaggtcagtggtcagggaaaggtgaatggctgggagcaggaggctcagggagggcatataggggcctgttcgcctaccagggagtgagaggttggaggtaggtgtggctgtccattgaggtcactgtccacctcctttgtttggcactacctgcactttcccgcttcctggcttcccctactggaactgttccctccacctgagttgcccacctctctcccccgctgcctttgaagtccttcaagcccagcacaaatgccatgttttataggaagccgtgtgagaccacctctttcttccctctgctccccagcaaactcctcatccttccatggggcagaagaccatggtggaaagagtgtgtgctctggactcagacagacccgggtttgcatcccaactctgctaatgactagctgtttgaccttgggcatgttacttagcctctctgagctttaattccttcatctgtagaatggggacaatacttctacgggttgtgagtgaggagtaaataagctatggtgccaagatcagcgctgagcgacaggaaatgcttggtaaactgacagcttttactgcagtccgtatcagagtgcctactatcacgattagctgggaacacatctgcctgcccgcagactggtgtgtgggagcccttgttgtggggcaggggcagtgtctcactcccttcccacttcctgccctgcaacctggcaccccctgacaagacagtgctccaggcagcatgagtgcccagggagtgtctgcagagttgaactatgttaaagagaagtccagttggccgggcgtgggggttcatgcctgtaatcccagcactttagaccgagatgggcggatcaggacgaggtcaggagatcaagactaccctggctaacacggtgaaaccctgtctctactaaaaatacaaaaaatagccaggcgtgttggcaggcccctgtagtcccagctacttgggaggctgagtcaggagaatggtgtgaacccgggaggcagagcttacagggagtggagatcgcccaccgcactccagcctgggcgagagtgcgagactctatctcaaaaaaaaaaaaaaaaaaaaaaaagaaacaaagaaagaggcgtcc

SEQ ID NO: 69922 - DNA, 797 bp, Homo sapiens
aaaaaaagaaaaaaaaaaaaagaagataagggttcttctcacaatagtggtgtccttcctatggaagattctcattttcatggcccaactcccccaccatgagaggacagtgccttgcatcttccaagtgtttctatcttatcagatgatttggtcagagatgtacagtatcttgtccaaggtcaagcagagaaatgaagagctgggatgcaaacccagaagatattcctctaaaagctgtcccatgctgccatggcagcacacaaaaaagggtgggattcagttctgccaggacgtgtccggcacctgtgatgggtgtggcattgttcaaatctcttgagggagcctatgggcccaggagaagggactgattttcataacggcagagtcagggaatgtgctcggcactcccagagagcgatggttaagggaccggtgacagtccagagggcagcctgtctggcccaggttccacaactgtcagcaaatctagatgccaaatccacagaggacatacaactgggagggacagttcataggtcagatggcaaaattgatctgaatctggatctcaaaactctttgaaggatggactgaagttgactgtaacaagaggaaatttgatagggaaggatctaaggtctctcctctccatgtatgcaatggaggcttagcagtggcacaggtgaaaaggatttggggggtttcagtgcctataagctccacctgagttaagggtgttgcctgttgccaagaaagttcttaggctgggcacaatgtctcatgcctgtaatccc

SEQ ID NO: 69923 - DNA, 1900 bp, Homo sapiens
aaaaaaaaaaggagtcctttaaattgaataaatttagcttcataaaaaactcactacattattgttatttttctgatttatatggggacccagtgaaatcttactgtggaccaacccatccttgagcaagtatttgggtaccactggtgcaaatgatgtcagattcttgcttctctaattctgtatttaaaaaagataaggatggctgggtgtggtggctcatgcctgtaatcccagcactttgggaggctgaggtgggcagattgagcccaagagttcaagaccagcctgggcaacatggcaagagcctgtctctacaaaaaaaagtaaaaaattagctgtgcatagtggcatataccagctactagggaggctgaggtgagaggatcacttgaacttgggaagtcgaggctgcagtgagccgtgatcgcaccactgcactccagcttgggcaacagggctagaccctgcgccaaaaaaaataaggatagctgattcccttactgagaaaaagactgaagaacaagcaggagctgccacttccctcctgccctcctctcagcagttgtaaagatccagtgaaatgatgtcataaagtctaggaacattcccacactcatctacaaatgttcacagagagcctactgtgcgcagagaccctgcggagctggggatgcaggaagcattagacgtggatgcacccctgagggttcagggtgcacagaacgtctgtcctcgggcataagtggctctacgggtaccgtgcacagagcacacagtgactcaggaagggggaggccatcaggccaaactgcagaaccaaagccatctcagatgtcatctagatccacccagtcatgtactggaaaagaacacagagacctaggcaggaagagtgactcgcctagaccacaattctggcctggggtgattatctcagtttggaaaactctaggtccggccctaactagctctgattgctctctggatgcacagtgcaatcatttggcctggactggaacgggcttctgaagtaggacagcctgacaagacttcctgctctctgttccctgcagttggggaggaaggtggagaccatcaccataatttatgactgcgaggggcttggcctcaagcatctctggaagcctgctgtggaggcctatggagaggtgaggggcaggggtggggaggaaggggacagagggaaggggaggaggagtagacccctctcctaggctgtcctgtgggatgggtgaggcaatgggggcagattctgagcctgctggaatcaagagtgattttgtttccacagtttctctgcatgtttgaggaaaattatcccgaaacactgaagcgtctttttgttgttaaaggtaagttgggaatttcttgtgataaagccagatggaaaagaggggtcaaaaacatgactgcggcagatggagggtcaaacagtgagccaaaagagggggtctgaggacatgttcagaagactgctgcccctgctagtgtgctggctcacgcctgtaaccccagcactttgggaggccgaggcaggaggctctcttgagcccaggagtttgagaccagcctgggtaacacagcaagacctcatctctataaaaaagttaaggaaatgagctgggtatggtggtgcatgcctgtagttccagtttctcaaaaggctgaggcaagagcattgcttgagtctaggagtttaaggctgcagtgagccatgattgtgccactgcactccagcctgggcgacggagcaagtctccatctcaaaaaaataaaaatagggctaggtgcagtggctcactcctgtaatcccagcactttgggaggctgaggtgggcagatcacttgaggccaggagttcaagaccagcctggcc

SEQ ID NO: 69924 - DNA, 1941 bp, Homo sapiens
gcctctttagtgtagaccactagggttatggcgaaatcttacctagtgttgagatacatctttatccttccttccctctcctgccagcaaattggaaggaggttttactgaaacatatcagccctgaccaggtgcctgtggagtatgggggcaccatgactgaccctgatggaaaccccaagtgcaaatccaaggtatgagccgccagaggctagaggtgaacagggatgcctggctcaaatgcacattccagttcactccatgccatgcttctagatcaactacgggggtgacatccccaggaagtattatgtgcgagaccaggtgaaacagcagtatgaacacagcgtgcagatttcccgtggctcctcccaccaagtggagtatgagatcctcttccctggctgtgtcctcaggtaggggcctgggcccttccaggagacccgagctttcatctataggtcctgataggtgggctggaataggagaagccctggtgccaggaccccggagagggcacacacagacagaattatgtctcaattggtgatatcccctgcaggtggcagtttatgtcagatggagcggatgttggttttgggattttcctgaagaccaagatgggagagaggcagcgggcaggggagatgacagaggtgctgcccaaccagaggtacaactcccacctggtccctgaagatgggaccctcacctgcagtgatcctggcatctgtaagtatctctgccttggcaatgccttgaagccccatgtccagctttctgcctgtgaggttcctcttcctccatggatttttggctctgagtgttagaactagaagtggaatgccatcagttcaatcctctccttgtatagatgaagaaatctagccttggagacttgtttatggtgacccaactggttaacagcagggtgggactttgatctcatactcctaggtatgggtgagtcacagtcctaggcgatcacaggggttcaacacgtctgctttctggtccaggtctaactgggtctgtgactggacagatatttcttggggatgctccttcccagaggtcacagagacagaactggctgggtgggcatgggatcacaaggtaagcagatgctcaaaagtgcagccttcacccctgagtttcactcatctcccagctgaccaaagaatggacacagactatgagcaggcagtttacacaagaatataagaatgggaaacagacatttgaaaaggtgcttaatctctcttaactttgtaataccattaaaattccccttgactcagcaattctacttgtgaaaatttatcctacagaaatacacaaatactcaaagatacaggaacaaggatattcccggtagcctgggaaactggcagtaaaccatatgaccatgataaggtctgttaagtaaattacagtccatccatacaatgttaaagagaataaactgacatgtaaactgtctgggacatgttaaacaaataagcatgaaacacagcatgtatggtatgtacttactttggttaaggaagtgtgtacacagaaaagaactctggggaaatttatgctaactctaacagtggttatctctgggatgataggatgtttatggagggctttcatttttacagtatttctgcaaatatattttatgatgactacgtattaatattacatttataagcagaaaaaccatacctacactcccttcaacacccacaatcaaatctccagtttctttttgtcagagccaatggaaaatcaatcagagcaaaggctttatcatcagagctgagctggacttgactaaaggctagctccatggcctttggcaagtgacaaaacctaagcttcggtttccggactgctacactggggtatctcacagggatacctgatgatttgatgtgataggttctgtga

SEQ ID NO: 69925 - DNA, 1075 bp, Homo sapiens
tctcccataaagtagcttatgtagacatcaagacagaagacatcagagaatcctagagtcctgatccagaacctcttggccattgactgtcctggatgtgtcagagagtgtggaatcccagaccagggaagtaattgacccaaggtcacagagcctgtaggagagccccaaaccattttccagcatctgcccattacccctctatcttctctttagtatctgaaggacattgcccaagaagggaacatgaaccttttaacataatcaggcttgggcttgcaaacccccaaatttattttagttccttctggatacattcccaaccagaacctttacctgcctgcagggtcttgtctgggatctgctccttgcccattcccaagaggagcagaggcaggccacaggatccattcccccttcccaggtacaaagacaatgaagttggaatcagctgttacctggtgccacagctaaggttagatgtgagcccagagagaacccagtattagcttgcaagctcatctgcgggagggcaatgcccttggagaaccaggagacccctggaaagcagaacagtcatccagtggagaaattaaaactgtgccagcctccaatggcaagagcacattaaccttccccaggcttctctggtccttatcccagtgcactaaattaccaaggaggaaaaccaaagtttgaattgatttcgcttttgttttctcacctaatatttaccaagggcctactgagtacagaatactcaactaggaatgaaaagattcccaaagaaagatctggactttgtccactagaagtgcacaatgtggtcagaagactggaaacactatagaaagggtgagcagtgctgtggtgaaaagagcccagccaggcaccaggaggcctggtttctgagtccagctttgccaatgactctcccagtgttttcagcaagtgtctctattaggtttggttttccttctccttaaaatgacagaagtgatggccgggcgtggtggctcatgcctgtaatgccagcattttgggaggtcaaggtgggtggatcactcgaggccaa

SEQ ID NO: 69926 - DNA, 6911 bp, Homo sapiens
agcctcccaagtagctgggattacaggcatgggccaccacgcctggctaattttgtatttttagtagagatggggtttctccgtgttcgttaggctggtcttgaactcccggcctcaggtgatccacccgcctcagcctcccaaagtgctgggattacaggcgtgagccaccacgcccagccaaattgtgtgctttcatcagattctcaagggggtcagttacccaactaaagttaaggagccttatcctggagggtgtctgggggctctgtgagtctatgattagtgtcaaaatgaaccatgcagactctggagctgcaatgactccacttccctctggcctgtggttctctgatcaacccctttcttgtttctgaggccaagtatcttgctaggcagggccattatcgacctagtacttggtgcaatgaatgcaaaggacctctcctccagcatggctgattctggttgctaagactctatcatccagggcagagatgaagcttcactcttgccagagggactattggctctgaaagacctctagtacaggggaaaaatagatgactaacaccttcaccatgaggaaagagtgggtggtgtgtctaccctttgtctaaactatgcattttgtccagggtcaggaaaaggttaagtcttaggattaaatacaggatattttttttcttgctgagaacagtgagagaagaccgggatagggatggggcagaactagtgtttttgttttcacattcagttctcctgaagcggtgtttggctgaaatggaacaacttctcaaagaaacagggttagattaaaagcagcctgttcctctgccaaagtgtggaagctttctctgccaagtgcatgcccattttctctttccagaggaaaccactgctaatgtctattatcctatcaaatatcttccatctagaagcattacatgtttccataataaacagggcatacagtgctcgctttgtcagcacatacactaaaattgaaacaatacagagattagcatggcccctgcgcgaggatgacaatcaggttatcttaaataaataaatagaaaacaggacatacacaaacacacacacacacacacacacacacacatattcacaggaattgtctgtcattcactgtatgtttgaaggaattttgaaactgtcaaactcatcgcaggatttcaggaaactttcccattaggacaagcaccagagtggtatcatcagagaatctgggagtctaagcagacaaagaagtaaagccaaaagtatttttacctatgtagttacaaaaaagttacaaactgtttacatactgttctgcaacttgttttggcctcaggacacattgtggacagtttcctgtcacttctgtggagctaacctcttttttaaaaaatatatcagtattctatcacatggattacaacataaaattgttgaagcaattctcctttgatgaacatttgagttttcccaatctcttattattacaaatagggatgcaacgagcatctctgtccatttacctttttgcaggataaattcctggttcacaaagtttgcacattttaccttttgtcagaaattgaagagggccaggttttccagggtccaagtcaggcagaacaaatgcagcaatgtggaacagacggaaactccagctctgtcatttcctcactgtgtgtcaccagagtcacaccacctcctttttatcagctataaaacaggactactgctgaactcgtagagttgggggaaagagtgagataacatatagattaccaacccagtgctgcgacacacagctattattgttattacaactgctactgctgctgctaattctcctccctcctttcaaagtccagttcaagctctaactcctttaaaaagcgtttcacatgatttcagtctaccaggccctcttcttccaagctggtacagacgagatggtctctgtcactcatctggcacttggcatgttctgcctatttttttctctccatgaatgtcttgtcaaccccgctagattaagtttcagaaggtcaaggatcattacctaggctaccttcatccccatgacctgccacactgccttgctcagtcactaaacatcaacaaaaatcactgtccccaagccctttgccagaactgcctgaatgtctgtctggtttctgccttccctcagatgtcctgcggtttgacaacacctacagcttcattcatgccaagaaggtcaatttcactgtggaggtcctgcttccagacaaagcctcagaagagaagatgaaacagctgggggcaggcaccccgaaataacaccttctcctatagcaggcctggccccctcagtgtctccctgtcaatttctaccccttgtagcagtcattttcgcacaaccctgaagcccaaagaaactgggctggaggacagacctcaggagctttcatttcagttaggcagaggaagagcgactgcagtgggtctccgtgtctatcaaatacctaaggagtccccaggagctggctggccatcgtgataggatctgtctgtcctgtaaactgtgccaacttcacctgtccagggacagcgaagctgggggtggcggggggcatgtaccacagggtggcagcagggaaaaaaattagaaaagggtgaaagattgggacttaacacttcagggaagtcagctgccggggagaaacttgctcctaaatgaacacataagtttagatcgcaatgaggagtagcagggtagctggttgctagagttacggtggggatcagaaactcttccaaacattttagcactgaggctggggtagcttttggcttttcccaggtctcaggaggtggcctgagtcagcacacatcttcccactcggtagacaggctggcctctccctcactttgagactttggcaactcctgggccacacggcctgcctctttgattactaatgattgtcagtgactcagagcttcctgggacttcgggtacccacccgctgttctccatgcaaacaaagcgccagggaaatgacccacagggatcgcagctgcagggagggccagggaggttgggggtgggagtgaatgctaaaagcagatcgtccagtgcccttttcagtgctaccggcctctcaccaagcagtcctccatgtgagcaaccccgagacaaaaatgctaagtgggatcaagagagcagcactcggagagggtgtttgccagtctgagtgtcccgcggtgcccgccaacccgcttcctgactgacctgagcaaggtcttactaagcagtcccatctctgtgggaggcatgcaacgcgtgcagggagttcaggtgccggtcggcgtagccaggcctggaggccccccaggcaggaggccgcccaaaggcggggccggcgtctcgcagactaggggctgggggcggccacagacggcctcgaaaccacagcccttaccccaatcccacgagccccgccaacgaaccacaggtgctgggctttagagaacatgggaaggcggccccagacctgcgggaacgcctttccctcagagccaggccccggccccgtctgggaagctcatcttgcgaagctgagggagctcagggcaaaggccaggctagcgcggaccggaaggggccgaggctgcacgggcctctgccagaacgctcaggacatcccggcctgggtttacaacgctgttaggaaaattaaccaatgaataaagcaacgttcagtgcgcagggagtgaaattcaatgcccaccgctaggctcctcgctgcctctcactcaagaggcccaaactcagacggcgtcagggacccggacccagcagccgtttcacgccaatagatagggcgcatgcgcagaaatcctcctcggctctctagcgtgagctttcccaaggggccacgcccagcttgccttctgattggtccagctggtgggttgtcttccgccatctttgatcagggcactaaggatgctccccacggccttcacagtgacggcggagaccctgccccgccagctgctcagtacgtgccgcgtagcccgtgcgagccaagtgtgagtccgggcgagcgcctgcggagctagcactgggcccagaatgagagggaggcggaggagcagcgatcacgtggttttagggactgtctaataattccacgccagcattgccggtgtttcagggggtgggaaccgctgcgttccccatcaacttttctcccacccaccaccctccccaacctacaagcccagctcagcttgaggtaactgctgaccggactgtcctatacagccctacaagacagaggcgcctagggctgaaagcgggggcctccgtagggagccagcgggggcctcaatagttactcattttctctacctttgatgaaaataagagctaattcttaataaggcctaccgggtatcacgcaaaaaccctgtgcttactattacactttgggttgttgcaaagattaaaggaaataagccgtgcaaagcgcttaagagcttggtataagtaagtgctcgtcaatgttggctactctcattttttttgcagacgtgggaactggggctcagggaggctaacagccagtaggcggcacagctaggatttgaacccaggattgtctccaacgccgctcaattatacccgccaaggagtcacagagacttagtgaagtgcacacattgctcacctgggtgaactgaggtccagcgggggaaggcttcctcctgttgtaatcactaaccccaactctgtctcccttgcccgattcattcattcgttaattaattcatccaacatcctgtccccaagaagctcagtctggggacatactgatccagttaaatgcgagtgcttcctagttatacatggcgactgctgagaagggactccagagtccaggcacctacctcccaggggctcaccgttcactcctctagcctcatttagagctcgcattaagagcacgggatctggatccacactgtttggattcaaatcacaacttcaccacttagcagctgtgtgttctgggaaaatgacccaccttctctgtgcctccattttctcacctgtaaaacgggctcccaggctggtgggagggtttcaggtgtaagacatggagagtcctttagcgaacatgtagactggcaataaactcaataaatggtgactgttataattaatcctcggaaccatcctagggagtggacactattgtgttccccattttatttattacattaattttttttttttttttttagtagagacgaggtctcgctatgttgtccaggctgttctcgaacccttgggctcaagagatcttcccgcctccggcctcccaaagtgctgggatcacaggcgtgagccaacgggcccagcctgtgtccctccctcgtttttacaaatgaataaagagatgctggataagcccgaggtcacaagctttgcagtgtagcatcccccaacttgatcccctgtctctttggctccaaaacctacactcagtcctgggagcgattagcgccaacagctcagagaaaacgtgacgaaaaccagtctgtaaaacccgagcctgggagaggggcttcggtgcgcggggggaatttgcagacgctccctgctggcggagatttcctgacctgtccttcggcgcgggactttcggcgggtcccggccgggcagacccaagtgccggcggcggagactgcagtggagccagtaccggctgtagtggccggggccgtggcgggagagtcatgtcagagccgcagccgcggggcgcagagcgcgatctctaccgggacacgtgggtgcgatacctgggtgagcgcggggcgacgggcgcggcgaccccaccaccactgggctggagaagcaggggtcgccggacgcccgcccggggcctggaggaggcgggatgatcttagttctcattctgcttttgggccggagactgggctcagacagggctagggacttgcccaaggtcacactaccctggtgggtcgcccagggcggaagctcccatggggtgagcgggctgcccgctctggcatgcgctctggctggctgtggagtcgggatctccactcccatttcggtcctgacacgcactggctctgtctgaacctcagtttcctcctcggcaaaaaaacaaaaacaaaacaaaaaacaaacgagatacacacgagggcctctctcattgggtggtggttgcgagggtggaatgggataaagcgcagaaagccctggcacttggcgagcgtctggtcagtggcgctgccctcgatcactctgcccctctgggtgcctgtcacctcattagtgcagttactcctgggaccaagaccaggaaatctaaccaataagcaatggtaacagtgactcagtgctcagtccgccctcagtggcccgagtccgaggtgggcatcatggcaccagtttacatctcggaaagggaggctcagagaggtcaagtcacttgcctaaggtcacccagggactgcttagctggctaggatgagaaccagcctgctccaacgccccctcgtggaacagttgcgagcctaggaattaaatgttccctcccccaggctatgccaatgaggtgggcgaggctttccgctctcttgtgccagcggcggtggtgtggctgagctatggcgtggccagctcctacgtgctggcggatgccattgacaaaggcaagaaggctggagaggtgagtgttagcctattttccaacccccaaccctagctctcttcttgtgtggttcagtccacagccttgcatgtgataaagtccctgtggacactccagtccctacaaccttgcctagtgcagtccatagacagtcct

SEQ ID NO: 69927 - DNA, 1356 bp, Homo sapiens
gccaacactccccccattgctgtagtagctgcctcctctgtgagcatttatcctggaggctgcacatcatctgtgtggctttcagacgccattggcctcatggtgaagtggggttagcaacagagactcctcccaccagcttgggagggctgaagtgagacatcccaggttcctggcccagaatgggcagtcgccccctcccaggcagcccagcccctgcctctgccccaaacacccaggggtagttgctgagtttagcaaataacagggtgctcaaatgtgaatttcggataaacagcaaaggatgttttagaagtgtacccctaacattgcatggcacatacttatactaaactgggcatcctgtattttacctggcaaccttacttgaaggggtatccacagagctggaatacctccttcaaacactctagccatgtacaactgggaagctctttctccagggaaagcttacctctttcctgggcaggggaccagaagcaattctttggggctttgagttctgtgctaagtcattcatatgggtggggaaacaggtacagagaggtcaactagacaggaggtggcagatggtggttgtgatgggaaatcgccattccctgtgtaagaggatggagcggacctcagctgggatggggcggggtcttttcccacccccgggttttgtggcctttgtcctagtgcatgctgggagtcgggccccaagtggccatcttcacgcaatactagcaataaccacaaggggggagcacctcccaacgtgcccatgttggccgattcaaactgattattgataaactcttagtgaattgctcatagtgggcaccgggtcctgttctaagcaattcatgcgatgtgactcatttaatcttaacaaccttcaacagaaatggggtacaaaaaataataataatcttcataacctcatcttgagatggatgttgttattaggtctctgtttcctagagttaaaatcactgacccaagctcacgcagtcccctaactcccgatacctcccccagcctaggactgcttttgcccactgcccttccagcctatgaccctctacacagtcaggggatgattcataggctgtgtgaccttgggcaagttacctaatgttctgagcattggttttctctctgcacagttctctgtaatgacctgaagctgttgtgaggattacagacaaaatgattcacaaagcatccaggcagagtggggctcacagcaagagctccacaaatactggccattatttttgtggcaagagacatccacttcaagggcaaatgattgaatcgttccatctgtgtctaacccagatataaaaa

SEQ ID NO: 69928 - DNA, 551 bp, Homo sapiens
tttctgtcacctgtaggctgaagatacaaggccagtgcctttgggagctcagtttcccatctataaagcagatatcagattttgcacccataagtgcatgtgggaaagtgcttgctgctgctgaatatttgcttgactagcctgagtcagacctcatagcctgcccacggatgagctcagccctccgtttgtttgtttccaaggagcctctcatggcaccagcctttggttcccattcatccccattcccgggtgtgatccggctcccctggcaagagttgtgtcagggactggggctcaagccagcctcttcacgtccccgaatcacagcagaaagttgggaaggaaactctggagtcctggcctttgccctagtcacccagggtcatggtgagcgtcagggggttgtgcttcacagatgccatgtgagcagcggacaggatgctgagctgaggaacacaagccctgccccactctgctgtgaatttccttggacaagctgcttcagtattgtgggtctctatggcctatcacctcctctacccacaaac

SEQ ID NO: 69929 - DNA, 709 bp, Homo sapiens
gatgctgaggcaaaaggatggtttttgccggagttcaaggctgcagtgatctatgactgggccactgcactccagcctgagaaacagagtaagaccctatctcaaaaaaaaaaaaaaaaaaaaaggaaaacacgcccatgggtccttgacctgctgccctcctcacctgcttctccccaaagactgtggggacttccagggaggagatgggctagggagagcaggtcccacctccattatctggacaggtgaggcctgggtatttccaattgcctcattttgagcaagagttttgatctgtggcctcctgccaagattttgccattctttcctgacaaactacacggctgttttgtaaccggcattataaaatggttttattaattattaataactatttaatgtgtacacagttatccatgaagaaataggaaataccagtgagttgttaccagcgttgccccaggctgggagagcccttccagctttcctttggcctctgacacccctgccccactgaccgcccaccccccattcctgtctggaaggctcgcctgccatcatcccgcacatccgacagctctcccttcagggtcacctcctccttggacaaagcatacgtgaccccttgtcaggtttcttggctgggtgctcccccagagtttggctcctgcccccaaccaagcatgcatggtgacaatgcacccac

SEQ ID NO: 69930 - DNA, 625 bp, Homo sapiens
aacttagctaggcgtggtggtgcacacctgtagtcccagctactcgggaggctgaggcacaagaatcacttgaacccaggagaaggaagctgcagtaagccaagatcgcactactgcactccagcctgggtgactgagtgagaccctgtctgaaaaaaaaaaaaaaagaaagaacccccaatgcaacagctcagccttgattatctcccatgatggagagttcattaccacagaagacattaccattccattcctcagcagctttgactgaacccaaatctgacctgtgatgattccagccccatcatcagaggtcaaacaaatacatgttatctcttgtcaatgtggcaattctgcaaatatttgaagacaagccaccaagttcacctatgcgatctttgctctgggctatatatttattaaaatcatcttctgtgtcaattctgtcaaagagaacgttctgtgatgatggaaatgtcctatacctgagctgctcattatggtagccgctagctgcctgaggctacggagcaatagaaacgtggcaagtgtgattgaggacctggagttttaatttaatttaatcgttacagttatatgtggctacaggtgatcaaactgaaca

SEQ ID NO: 69931 - DNA, 1123 bp, Homo sapiens
atcgcttgaactcaggaggtggaggttgcagtgaaccgagattgcgccattacactccagcctggacgacagagcaagactccatctcaaaaaaaaaaaaaaaaaagattacagagaagcttgggccctaagaacaaatcacaaagagaagccaaacaaacaaatgttgcaacctggacatgaaaagcagtctgtctacccaaggctgcccccgcagccggatggcagcgccactccctcccccacaaccggggaacaaggaccagggccgggtggtggagagcacgcaaggtcagaagactggattcggctcctggtcacgcagagatgggcccctgtcccgcgtgctgcacgtagccgcctcaacaaccgcacgctggaccagagggcagaacagaggcgctctctccaggctcggtgttccagtctgtaccatgggggctccagccgggttgggcagtgccaggctgctcagggcccctcctcaagcctcccagcccgcgatgctcctcaccctggccagcgcttcctgctgctgggggctcaggtccccgactcggctgctcatggtgcccgcgggcgcagaaaggctcagggcgcaggtccgcccgcccgccgccgcctggccttgtatccgctgccgcctggttgtgcctcctgggccagatgttggtcccgccccgacgggagaggcactgggcctgccccgccccgcccagttctctcctcctctccaggattttttgctgcggtcaccaagcgcaccctacttgggacagggaggtgacctgccgggagagtggcctggggcagctggaggcagccacctccaggcctccttactgcgggggctcccgcctgttcgcaggtggcaggaaagggaatacactgagatcctctttccagcaaaatggaggaaatttttttttaaatgtttttttttttttgggccaggcgcggtggctcacgcctgtaatcccagcactttgggaggccgaggcgggcggatcacgaggtcaggaggagatcgagaccatcctggctaacatggtgaaaacccgtctctactgaaaatacaaaaaattagctgggcgtggtggcgggcgcctgtagtcccagctac

SEQ ID NO: 69932 - DNA, 1564 bp, Homo sapiens
ggttaagaacactggcaatagaaactttcactctgaaagaaacacttaagccaactatatattcctcattcccattcccttcccagtcttttcatgtcactgggccgattctccatacagccacaagaactccctgaaaaactctaatcgtgttactcctcctttttttcctactgcacgtagaataaaatccaagctctacactattcctactgcacttagaataaaatccaagcttacaggccttgcacgatacagtacgtgtccaaccccaatcttatcagatgccattcttttcttggtttacatgcgagtcatcctaatgtccttccaactccttacacacagcaagccttccctgcctactgatcttggcacttggtttcccttgtcaggcctgctcgctaagcactcccatgccccagaacccatccaagacgttctgatctttcccatttcagccgaaatgttatgcctcgaagagaacttccaagacaacactaaccaactaatgtaacggtgcagtaacggtgagctctacgtaatgtttatcaccctttcggtaaatagtggtcccacggctcggcctgcttttggaatgaagctacgcttggtaagttcaactctctttcacagccctctccacagaaagaactctggagttcgttctcggatttcactaaacgaatactgccatccttgtccattctcggaccccttctcgcagctgattacggtcacgtcgatcccgtctttccagtctccacgagacggagcccgggaaaagagtcgaccccatgctctgccgcccccgcaccccacccctcgggaatccccaccgtctttcccaatcaccttcttcttctcaaggcctcccatcgctccacgttgaggagccgactagggccgcgcgtacagggagctccacttcctcccgcacgtgccctgccaaggaccccgaggaccctccccaccccacgctgtctgtttgtgcgggctgcccaatgagatgcctgtacaagtccagggaaagatggggatttcctcctcaagatttaaaactatagtctgaaaaaaatcactgagaacactctttccagatctttcccgctcacaatggttacaaacactttaagtgttaaaacaaacgtggatatacaggcttttctgtaatcaccctgatgacgattcattgactgtgagcctcgttgcatgttgggacggagaggggcggaaggcttagggacagcgcggtgccttctgggatgcagaggggcgccgcactccatggtgcgcgataggattgcgttgtcaaggtaacggttgctaagcgtcgtcagacttcggctgccgctgctgagaagcggttcccgaggggcagggtgagactgcgctgagttcccaccggcttcgggttctctttggttcattcgcggttatgcggctaaaatagaaaaaaggaagacatttttcctcgcggaggtatagagatcctagaggccacttatattttctgagccttagtggtggactcgtggtatatttaaaatgtacattcaaggct

SEQ ID NO: 69933 - DNA, 1523 bp, Homo sapiens
gtggtgtaatcttggctcactgtagcctccacctcttgggttcaagcgatcctcctgcctcagccccccaagtagctgggattacagacgtctgccaccacgccaggctaatttatggttttttgtatgtgttttttgtgtttttgtagagacagtgtttccccatgttgcccaggctggtctccaactcctgagctcaagtgatctgcccgcctcagcctttcaaagtgctaggattacaggtgtgagccaccgtgcccggacttaatcccattctttaacttgttttgttttgtcctctccaggaggctcccagccctttcggattggttgagaaaagtggcctggctggtctggggccagcggcacccaccctcccctcaattgcccaactccccccccccaccgaactgcccaactccccctccccaactgcccaactcccccacccccacaatcccctcccgccacaactgagggaggcggtgctgaaaaacagctgactccagcaatgctgctcacgtgaccactgcagctgcagctcccgttccactccttgtcctgggctaggtgggcactaccaggggctcctttggtaaggagtaccgggtaggcacccggtcctgccaatccaccactggaacagctggggggacagcagacaggcacggtcggacagacttgacagatcaggcatcaggccctctgcgctggtcccgggctctttaagcaggaacgtgaatggcctcaagatgtctcacatggtcccactagccctcctcctccctttgttccctacctccaggagggctgctctgcccttccttcctctgttctttggccttatgttccccgccaccacagaccttcccccgccccacccctctgcagacttagccgtgcattgcaggcatggaggattaatcagtgacaggaagctgcgtctctcggagcggtgaccagctgtggtcaggagagcctcagcagggccagccccaggagtctttcccgattcttgctcactgctcacccacctgctgctgccatgaggcaccttggggccttcctcttccttctgggggtcctgggggccctcactgagatgtgtggtgagtaactcgcctctatcctgtgcctctttcctcctgggtccttagtggggtggctagggcataggatgagggaacttacctgcccttctaagctcccatagcagtttgggcttagctggacctcagcatttaacacatcctattgtgattgattatatgtttgactcctcaccagacaagatctccgttaattcagtcattcgttcacacattcattcagcgcatactgagccttttctgtgtcaggcccagtgttagcctttggggaacgtgcaaagcatgagacaagtctaatccctgccatcctagagcttatgttctagggaagggggacagacaaaagaaatggttaggtgctcccacctgaaatctcagcattttggaaggctgaggcgggaggggaggatcgct

SEQ ID NO: 69934 - DNA, 806 bp, Homo sapiens
ccacaaccctttctggagaaacactaaatgccaccattttttggtccttggcctggaaatttccctatctgcaccccctgcgctgtagcttaggctattcagcagagatctgcaggctccagcgggcgtcggacttacagaggcaaatgtgaccatgtaaattcccaggcccacccgtgacagagagcctctgattcagcaggcctcctttgaggctggggattttaaacccgcgtcctgtgattgggatggggattgagggctatattcagcgcctggccaccagagggcgcagcgggctgggttcagcggtacccctttgagatcttgtgtctcaagacaggttgctgtcatcaaggatttgctggttagacaacaggcaaggggtgagctgggtcctcttgggcaggagcctagtaggaagaccgacaacaggaaagaggctcacatctgatactgggcacatggctgggccttggtcctcgtgctcccggacttcagagctcagaggggccagggcctggcctagcctggaatctggatggacctcttctgccctggggcgcgccgtttacccaatcctgacctcagagagcgtctgtcgttctggtgggaaaaccgagacccagacaggaacaagggctcagtggcaaccgctctgcctcccagcccagggctctgtcttgccggggctggggcacagggtggaccccaggaagttctgctatgagtcagcttcgagtgctcaggggaccggacagaggctgctggccggggaaggatgccggccggcggtacctacttcc

SEQ ID NO: 69935 - DNA, 1912 bp, Homo sapiens
aaaaagatttcttccaggtcggagcctagggagtcgcaaagaccacctgaagaaatcacaaaagatctaaagaacgtttagcttgagagggaggaggagaaaaaaatagcaactcggtagcagttcagcttcaccactttacagcctatgaagtatttggcttccctcatctggttcgatcttcaaagcaacctaatcagaccggcgtctagagttaatatttccattttacaaaagaggaaagtgagacacagcgcggaaaaggacttgttcagaacgagtcataaagcaaagaagccgacctttatggtccattatgtgtgggaaaaatgaacaaacaccgcggggcgttcgtgaaatactaagttataaacatggaacaaagtccaagagttaacgagagcgaagcatcacttctaggggtgggccgggtaggtttcctaggggagctggcattggaataggcttcttcgcctgcttagtgtcaggacccccagggttttacctctctccttcaggcgggtgggcgggttcgctcaggaagtagccgcttggggaagccttaggcaaggttcttcgggagagagacccgtcatgatcccgcagcctcaatccccgctggcctaacgctttggtttccatagcaatgggctcgtcgcagaaaggaatagcctgtgccgggtcttcagagaaatcctggcctcggctccacgcccctgagcagccccaccctggctcaacctgttacccgccctgccggcaagccggggtcactgcagtccccgtggcgaagcagggtcagctcagctcaccgcaccccactccatccagccctgcccatctctacggcaacgggccgggtcgcaccagggctgcagccgagagacagtctcaccgcttccgtagccgcccgggctctgtgcgcatgtgcgacactccctccccggccccgcccccttatgcgtctcccaggcaacgcgccgcgcggggctccaggttccgcccagggactaactccaggtctgcgcgcgtccaacgagcacggctctcaaccggcctcctggcgcccaacgaccatggcttccaaccggcctccgtgcgcccaacgaccatgactcccaaccggcctccagtttccaactgtttctcgaacagggaagccgccatgacacagctgactacgcccttggtcacaggggacctgagatcctccacgatttacgggaccggcgccacctcgggctcgaaccaccctctcgatagggccgccgctaagtaatcggcgtaggggttcagccgcacatctccttcccgcgccgcggaccgagcagtcgttggtgctcttcaggtgcggcctgggtgcccagagccttcgttagactctcggacccgcaagggagcccgaactctttcagactcgctctccctcagccggacctcggccctttttcacaccccaggggagtctggatttctcatagtcctgggcaccagccccttcccagtctagctcttgggactccctgaagccggaactccctcgcctggactcccgggagaacctggaatccccatctccagtccacattttctcagaatctgtcctagcccttcagtctcccaggcatgacatcgtgtggtcccagcgccctaggtggtgagctgtgactctccttagagcctggcgaggccgaggtcctccccagctcgaacccatcccacactccccttctcagcctctgtgttccccagtggtcctggaaaagcccccagttccctctgcctggccccaatcctcacaaacccaattacccacgctcctttccattccataacccccatcactgcatcctccaggctcccatccatggaggacttgaggtggaaagcaatttggttcaaaataaccatt

SEQ ID NO: 69936 - DNA, 626 bp, Homo sapiens
gttttaaccattctggggtcacagcctcctttgttatggacctactctggaaaaatgcacagacaggtaaacctctgcggaagcctcacagactgccagcctacccagggatcccgggaggtccaagttcagaatcccactttgagatgtttcttgtactaaaacgcttggtttacaaaaagtcttcccctatttgtttagagaacccgaacgatgtcgtcactggcagcgaagcgccttggcatgaaccgtaggccagctggctcaggaggtggaggcggtgaggcggccacttggggccaccgcttctggcggccgcaggagcgacccacagacaggtaatggctgccatggggggcggggcgtcgtctttagcctttagcgcccctgtgcttcgtgcgcatttcgtggcctctgggtgccgtacctgcttcccacccggctttcctgggtggcggagagcgaacccaccccagcctgggttgggggagggggcgtcggcgcagggtcccgtgggcagagctgcgctgggagctggcgggctccgcattcatcattgttcctccagcgcctggcacggctgggccgaagcagagaccgtggcctgaagcgcgccatccccttcg

SEQ ID NO: 69937 - DNA, 965 bp, Homo sapiens
ggggattgatttccctaagcatgataggaatccccaaaactttaaaacatttacctttcaacaaacaccataaaccaagccaaggacaaacgcatagaaaacggactaatgttaactaagtccaagaggcttcaggcgcttggcctcgggtcaaaagggagacatacaggctggctcttccgggcaagaggaaaaacacgcagcttcctttccaagtgttcttcctttcagagataaaagcgccgaccctaaggacatctgttcaacgaatgtttttccctaatgacccccggaaagttggaaagccggggtagaaaagatttcttctgcactttgacttaattaatgcgcagcagcttgcaggaaaaaaaaaaaatcctcgcttctctgtttcgggtgtgagtgggccattgctctccctgtaaggagctactagagacgctgaggcaggagaatcgcttgaaccctggaggcggaggttgcagtgaggcgagatggcgccactgcactccagcctgggcgacagagcgaaactgtctcaaaaaaaaaaaaaaaaaaaaagtaggggattagagctggccacggcttccccagaaacctgcagttactggagtaggaagaggcctcggagaatccctggaagcatctacctaaaagacgcgaggaaacccccaaaggccacaggcacctgcaccaaaccctgagtgccgcaggaagctcgcgaggcttccaaagcgcatgcgcaggtcacggtacgggcacgtgcggcgcgccagcaaaaccacgcaggcgtcttgtcgcttccgcctcgagcgtgtggcgggattgcggaagccctccacagttcataaccgttggctggttatgaaccgttcataacgggcgttaataaccataccctgttagactaagcatggtccacccgcgaatcctctacagagatggccaagcgctggggtcgtggc

SEQ ID NO: 69938 - DNA, 2396 bp, Homo sapiens
atttatgatgtaatattttggaaggaactatgtcataaatctgtagctttaaggagcttttagcattaagttgcgatagctcaattcagacaatctgagtctcgtgtggatggtcctgaaggagatggtccttgagtgggtggtttatgactgctccatcttcatgttcttccagccttttttggttccccgaaatttcctgtcaggaaatttaccaacgcggaaatttacccacttctgtcagaaaactgatcagccatgtcttcgccacacgtgatgccaggattcttaaacaggcccaagaccggagaccaagatgtcgacggagtgttatatggcgcaagttgcagcttcaccacctcccaagtgaaaaagctcctaggcactcacgatttcttttttcaaagccggaccaaacccagttcagggtggtggtcagattacctcacacttggcccacataaacacctcacaaatgacccgcccacagcacctcgggcaggccgcgccccgcccccacgtccctcagacaacagcctcagcctcccaggcccttcccgggcctcggtcccgtggccgcctccccacgaagaggagctactcccggcttccaaggaccggatcgagggcagtggcgagcgcaccacctgaccgggcactacccggatctcacaactgcctttgtccctccccgcggaattggaacccaacagccgcagagcgctcttggaaccatgtgctgctgccgcctccgccgccgccgccgctgcctccgccgccgcccgcgcgccgcccgcgcgccgcgctagttgagatggtgacaggattcagcaacacgaaattcggcgtttagagctgctctgccgccgccgtcacagacaccacagccaccgctttgtctccgatagtgcacacagccccggccacctcgcacactccccgacgccccaagcccccgaggcctccgcggagcattcagccaatcacaaagctgcagctcctcccgcccccgccctgatgtacagcctcctgattggcgggctgcgtgtccccatgtgaccggatcttggttggccggtcccgcccctgtcacgtgacagcgtgcgcctctcttcctgctttcctgaccctctccgccatttaaagaaacagtaccgggggcgggccgagcgacgcagccgggacggtagctgcggtgcggaccggaggagccatcttgtctcgtcgccggggagtcaggcccctaaatcgaagaagccctggcgcgccctccccccctcccgggtctggtagggcgaaggaacgggcgtgcggtcgatcgagcgatcggttggcggctctttctcctgctctggcatccagctcttggggcgcaggcccggccgccgcggcgcgcgcccggtggccgttggcgctcgcgccgcgtctttcttctcgtacgcagaactcgggcggcggcctatgcgtttgcgattcgacgaggagtcgtccgggtggtcggcggcggcgggcagctgctccgccccgctccgggggaggcggcggcggcagcggccgcgggatttggagcggccggggaggcgggggtggccggggccggcttggaggcctggcgccacccttcggggcctgcaaggacccagttgggggggcaggagggggccggaggatggttggttgtgggatttctactttgccttttcctccttatgccgccttagtgaggggcgggagctctggcggcagccccggggtggggagacgagctccggagtcggaagagctgggttttcttccgggcctagccaccagttggcggagtgaccttaggcgagtcactctgtaatttgtctgcgcctcagtttcctcctctgcctatcaatgtgtgtggggttgaaatcgctttgtaaactataaagcgtgggtgtacgtaaaggatggttattgtttataattttttttgagttgtaagaaaacttagcagttccccaatccttgggttttgaacctgggaaccttggattggagttggggatccccaaacttcctgaaattgtgggaatgtgcggtttgggggaatgatgggaatttgtgggaatgtgcgttttaggggaatgatgatccatcgctagcaagttttccaagggggctgtgacccagaagagttaagaatcacaatttcttcatgctacagagaggaaactgaggcctagatgtcatttgggacccttcacaaccattttgaagccctgtttgagtccctgggatatgtgagctgtttctatgcataatggatattcggggttaacaacagtcccctgcttggcttctattctgaatccttttctttcaccatggggtgcctgaagggtggctgatgcatatggtacaatggc

SEQ ID NO: 69939 - DNA, 1449 bp, Homo sapiens
ccgccccacatttttttttttttttttttttggagatgggatctcactctgtctcccaggctggagtgcaataaccaatcacagctcactgcagcgtcaacctcgcaaactcaggtgatcttcctacctcagcctcctgagtagccgggaccatgggcacgcactaccatgcccagctaatgtttacaaaatttttgtagagacggggtctccctatgttgcccaagctggtatgttcactcttcatctcaaaacatagccaggaagctctagccaggagcacttctctttccaacaccctgaaaaacagctcataaagctgaaatgggggctgaggggcgtgccacaagatacatcccaggggtatgggaactgggagcctcactgcgtgacctcaggcaaggccctcccctctctgggcctccttttccttggctgtataatgagggattgatctaaattgtctcccagggcccttttacttggaccatgtgtctccctcccaaaaggaaaaactagagggaaccaaaagatgtgggtggtttcccttgttccatctccaagccccaaatttggatgaaaatgtccagtgtgacatagatttaatataaacactcgtgcattaacactcacaaataccccaaaaggagtcccagatgggctatttttatcccttaaaacacacacacacagaaacacacaacactccaatccccatcacccgcacttggtcagtatctccagttggtttttacgagaagagagagttccagttaaagggagctaattaaacagctttgacttggggcgggaaagaggctgtcgaaagcctcctcgctgggcatgatgtcaccacaattgtgcgtttctcatgacccaagaatgtgaatgtgtttgcactgcacgtcggagccagagccggtgatgcaagcacagcctggtaaacaggccccagacaggcaggccctgtgaggagccgtggtgcagaggcctggcaggggcccagctagtgtttaactccttcctggcagaactggctgctgggccgctaaggtttggtcaaggagccttctccacccgtccctgcttctctctgaggcacagtccctgttagtggcaagccgtcaatctggagccacagtagacctgcattcccacccacctgcaggttttgctcgctcaggagccttgggtaggtgactctctggtcccgagtctcagttttcttatctgtacaatgggaagaggaatcaggccctcaatctcatacctacagctccaagttcagaaaattcagacagccagaggcttttctgcacacttagtgaaaactcattcaggagcaatatctgacctggattgactgagggtgtgcaatctgttcatttcacttagagtcaatactcacacttctagctacagaaatattcgtatgtttcattggagatg

SEQ ID NO: 69940 - DNA, 1587 bp, Homo sapiens
atgagcccactccatcccctttcttgttcctcttcctgagagccctgtctacctccatgcacagaggccgtagggcaacccagtggggcagggctccttccccaaccccaaaggccaggcagcctgacctggaggaggggccagaggagctccatctcctcagtccctgacccttgtccatgggggtaaattaaagatttactttacctagaagacaagtgacccaccccactctcataccttcccccgcaggcagaggctggaaccaaccagcgtagcccagccactgggcagtgcccagctgctgccatgacctccccaaggcactctgcctgtatgttctcggaccagcgcattagactctctgggtgtctgcctctccactatcaccgcaggatgtgtgcagcctggaggggatgaggttaggtttccaaaggtgcccgccagtcagttcgaccttccctcaggaagtccaagtcccagtgggggtcgtagaggcagcacagtccaaaaagagggaatgccaggcctggttcccgcacatcctcatctcaaggtatccacaggcaggctcagggttcttcagccgccacctccctctcttaagcgaggctcgggcggcgctggaaaagagttttggagagaagctggagcagtggttgaatctctgggaaaggacagatgagaacctgccccggtctcgggatcggtgcctctcgaagtctttccgaccccgggagcggctcctccagcacccggcgcccgccattactgcgccccgcgcgccggcccggcccccgctggcctcgtggcaagaacgggggcgtcccgagccgggctcctccccgcggggccgggccatataaggaaaagctaggcccgctccgcccgccctgcgccccagcgtctggccgatttggggacgcgggcagtcgcttccggccccggctcccgcacattcttgaggattgggccggggatgggaggaatggggacgcctggggacttgcacgccgcgtgcccctccaccacccgccgggacgccctctgcctcggtcccgagttcgagttcgacctccgccactcagctgggtgtcctggggaccttggtttcttccctttagatccggacactgaagcaggcggtagcgggtgtcttcctacctggctaccccttcggcgcctagcgcgaggcagggtgggcgaggcgagggcggcgccctgcgagggagggcggtcgcagaacctgcgggccttcagcgccccctggcgaggcttccctccaccgccggcgggacccccatgggcaaccgggggagctgggactgaaagcctggagagccccctccgttgtgctgttggggagactgaggcccagtgagacctcagggcctgccaggcgttcccaacagcgagggcagagagtacacggagagccggctccccagggggaggaagcaccctctttcctcccgggagaatttcactgggcagtttcggaaaccgccccatccccttccccttccccctcggtagacaatggcgctttgtacttccttccctccctcccacagctccctccttaca

SEQ ID NO: 69941 - DNA, 629 bp, Homo sapiens
acctgaaaatggggcaagggtgggggccggggcaagctctgagctggcagggagccaggaaggtcacaggatcagggcaagaactcagttgtctctgaggccctggagagggtgcagacctctgaaccacctgtcctaccttaaggcaggtgtgttaatgcccctccctggagcaaagggctgaccaggcctacggcagaaaggtgaaggtagacagacagcctccttcctgctgccagttgggacctgggccaggcagatgggtacactctcccctccccactccatggctgttccagcctcagcagccagtttgaaggattcccagggggtagccaccttgcttcggcctcttccaggctgggaagtgggagcctgtgcctttaaattctcagcaggttgaaatggctgatgacatcactggttcccgggagcggtagagctggagccggagccaagggagtccaggctgccgggggctgcagacatggagggccagagcagcaggggcagcaggaggccagggacccgggctggcctgggttccctgcccatgccccagggtgttgcccaaactggggcaccctccaaggtaagacccctgagacccagtgccccccgctttcctg

SEQ ID NO: 69942 - DNA, 1694 bp, Homo sapiens
tcctaattccaccatgtttattagctagcattctactaaaaggaagactttcccttcacccattaatatgctcacttctttatgtttgtaaagactcatggattactattttattcaattagttatactctattactatcactccatattttgattctgaaattgccctgacttggccagtaagatctccttaaagacagctcctgtgttctttgacacattcccatgattcttattaccatcatccttatattctggtgtaacaagatgttccaagtttatctggtactttccggaatgagttagttctttctctctctcttttttttttttttttttgacggagtctcactctgacgcccaggctagagtgcagtggtgcgatctcagctcactgcaacctccgcctcccgggttcaagcgattatcctgcctcagcctcccgagtagctgggattacaggtgtgcgccaccacgaccggctactttttgtattttgagtacagaggggtttcaccattttggccaggctggtctcgaactcctgacctcaagtgatccatccgccgcggcctcccaaactgctggaattacaggtgggagccaccgcgcccggccggaatcagtttttttcttttaggagccccgaacccaaagctctttgaaaagctgccgaagctccaaggttcctccgcttcctgcccgcaggcggaaccttagagcttcagccatggaaattaacctcttccggttggggccggaagtccctccgagaggggcggctccgcgtcatgtgactggagtccgcgtaggaggggtcggaggtcttacccaacagattgacgcggcgttagtattggccgtgtacccgaaaaactgattgactgggctggcgttaactgtgcggaggcaggtatgtgaggggctggggttggggcgggggcgccaaagtttagggacgggggcgggagacccgggtccgccttcccaggacacacgggcttgaacatctgagcccaggggcccagagacagcaagaccggtcgtgtctgtccccgaaaagaggacgagctggcgttgtggttctgcgtcccatgaatacagattggggaaactgaggccttgcgaaagagaagggctcccacaagctctcctttcgaggcatgggcactgattcccattctatcccccgtgcgagaccgcctctatcatctgggagtgcatttcacgagtttgccctgagtggagaagcagaggccggggagcgcggtgaacagagttgggctgaaagtaagagacctggattcgagacttcgccaccgacagacaattgtgcgttctgggccaaatctcttccctgtgctgggcctcagttttctcgtctctaaaacggggcagtgtttttcaaaatatggttcttacaccatctgctttgtaattctctgagatgccggctttacagcgcgggactcaattcagacttctggtttagaatctgaacttatgcgtaggggggtcctgtatatactaatgtttgaagctcattgattttaagtgctttcctgctgtgagcactagatatccattcttcgctttgaggcagctggtgccagttcaggaactttgaaagaactggaatggttagctcagtaaagagagcactggaagggaattaactttttaaaaattgaaaa

SEQ ID NO: 69943 - DNA, 1309 bp, Homo sapiens
acccttattttttaaacttttctcatgacaaagggatggctggaacaattattccccatttgcaggtaaggacactggcatagtgagtgacagacctgagccttaggctaagtcctctggctccagattatttctttcatggtgttatactagaaattcacagcccttgactggtatctgtccagtctgaagagcttttctttaaaacactattttcctcagctgtattggtttgattgaaattaaatccccttcattcattcacataccttaatcaaacatctacttcctgtcaggaactgtgctgttggccctaggaggtatctcactggagtgggtaatagttcagtggataaccaaacctctgtgtgagtatgttatctttaatagggagaaatttgagaaaacttgaaactacttctggttgcagatccctcaatttttttttcatttgtgtaagagttttgggtaatacttaaaaaaaaaaaaattgactctaagttatgtaacatttccagttctgaacagcatgttttgctgttataggatactgattttccacaactctagttggctatattgagttgtacagttctaattgctcctgggcatcagatctgtcaactcattcacacacacacagacacacacacacacacacacacacacgtatgtatatatcaggtgctcctgaggcacctagccctgtgctgagtaaggaacctggaagctgggtctgcgcttgacaagacgcacaagaacagatcactgagttaccatttgttaaggacgttggcttgggttgggaagctttgcctctgactaggtctgtgaccatgggcaagtgacctaactactctgagcctttatttaacatcccaagggatgctaatgatgatacagtagtgtttacctaaaggcaggccataaagattaaatgagataattcatgtagagggctgagcagtgttagctatgttacttatagtgataagaaatataacaagtgtcccctaattttaacacttggggaaaatctgattttctctgggtcaaattgtatctaattttagatttcctctcagttcataaacatacacagttctgatgtctcatctactctgcattcaaggaatgatgctcattgagaaaggaaagttgtgactcatttactcagcaaattaaccaagtacctgctggttgcatatgtctatgaggaatatacaaaaacagtttaccttcagtgaactcagagaccttaaaagggagggggattaacatttcatgagtacttaactatgtgccaggc

SEQ ID NO: 69944 - DNA, 1232 bp, Homo sapiens
cctgcctcagcctcccaaactgctgagattgcaggcgtgagccaccgtgtccagcccatcctgtttttttcacttaacattatgtcatgtaattgaaattcctacgtaagcaaaatctctgtggaagcattatttttagtggctgtgtaatctattatgtggacgtaccagtttatttaaccaggtaatgggagctagttggggagaaaaagagacgttaaaatcatggagccctttggaaggttaggcagatctgggttaggtaccctatagggtatgtgagccaggcaggccagggctgaagggcactgagagtcaaaggcttttcttcttcccttagtcccagcccttgctgccttaccatgaattatgcacttgttccttgtactgtgtctacatcctccccagcattccctgtcttcaggtactatgtacacacttctgtcagttcccagtacactgggttgccttgttggttcacttgtctgtgtctccctttagactgaaaaaaaagttttatttctgtatcttgaatgcctggcaaataataggatctttaatgaatctttgaagattcattcctatctactaagtagataggaagattagagggaaccagagaaaaggaccagtgcagccccaatgaaaagaagccagtcctttcagccttctctgttcttctgatcctgtatttgagggccaaatctccatgggctagcctaggaacctaaacaccacttagactttaaaatttcaaagctggtttatgtgtttccaagttccaataaacttattcagagttcttcccattccagccttctatgagtgtgatgtagacattcttggaatgcaggtcccatttctgcctacgtgtggtccagcagcagtctaatgagcagcgtagacaggctcaggcatgccagggttcctggcagaaagcttctgtgtgaataagcatgtgctcacagaaatgagacctctgctgggatcatgcctgttatttatcacccaaattcatagtcttcatatctaagattaacatttctaggtgtctcactacaccctggtctagaaattcttggagttaaagggacagaaaaggcagatgatgaattcctacagttctctagaacttgataattgaatttaagaatgctacagagaaatttcctcatgagatcaagttccctggtggttcctgcagggatattcaactctcgtgttctctttct

SEQ ID NO: 69945 - DNA, 1799 bp, Homo sapiens
gtctacatggcattttaagaactttttgatgctatcaacattttttaaaagtggcaaatttcacctaaatatctggatttttggcatgttttgaaaggttggaagacctgggaatggtaggcccatgttcctgcaggggagtgctcgtcttccaatgcggcgcacaagctccagcgtcctgcgctaaacctaattggcctggctgaggatctgctcctggaatgctggttggtcgcctccaactgtctttgacttagagattatttactgtcagcttactcatagtggcgcagagaagtggtttctctgagctagaagcttctaagaaaagtccatcctcaaagctgtttgtgggatagacctggctcctccattgtaatattcctgattccaaacactactggaaagagctctgaactggcagttagcaggcctgggctcccatcccggctctcctcctaatgagcgacgccatttcaatgtagtcgaacttagcctctgatccttaactttccctatctgtaaatgagggcgactagatgggtgcggactgtcatccgtgttgagacttccggcccccgcagaatcaaccttaccggcgggagcacctcgaggggacgccgctcgcactagggggcgccagggccgctgcagagcccgagccagagccagggggcggggccgcgtctcgggagcgaggcctgagagcggcggggcggggcgtcggcgggcagtcccctgtgccaggtgtggtttggtcctcccagggcgccgtaggcggtgcatcccgttcgcgcctggggctgtggtcttcccgcgcctgaggcggcggcggcaggagctgaggggagttgtagggaactgaggggagctgctgtgtcccccgcctcctcctccccatttccgcgctcccgggaccatgtccgcgctggcgggtaaggaagggctgctccgccctgtcccgctgttatctccgaagtccggttccatggcgcctgagggaaaccggctgtctctcgggggtttcgggctggttgggtcctcgtgggtccgagctcctcagaaaagctgggaggcggggtgggcacagcgctccccaggcatttggagggtgggactccgggaatggggaggcagggcatcctggagacagagggctccgaggggcaggcgggttgggaggcttcccgcgagttgaggtcccggggaggaagagattctgggtctgccaggaatccagctttttggagggacctggcggccgcagacccccaaattaaccctttttaaggaagttgaaaagcatggggttctcttatagtggaagctctgtggaatttgaggagtacaggatcctctagggttcaggacaattaggagagttaccccgggttctgggttttctgagggaaatggaggatgtgacttccctgccaagacccaaggcttctcgcgggcatcttggtgtctgggagtcccccggggctgggagctctttgcagaaaataagggagtatggagccccttgaggtttaggacaggactaagggtaaggagagatcggaccattctttttggggcccaaagatctctgctacaggtggcgaaagtaggccacctggggttctgagtcctcctgtggaagctcccttggcctctctagactaaagactagagggattcggccaaacacctcctggaaggaagagttgtctaagggtgaagggtagcttcagagttgggttagttgcacctgcagtcacctccccgccacctcacacaccaccctgcagcttcct

SEQ ID NO: 69946 - DNA, 806 bp, Homo sapiens
ggattacaggcgtgagccaccacgcccggctcttttctggactcttaacaatcagtagccactgttgataagtctgcaaatatgagaggtaaacactatagagggagagaatgaacagcctggtacaatgagatattttcttaagaaagaacttcccaggctgactggactttggattgatcctccactaggcttcacagaaatccctaagactttgcattacagtattacatttcttttacatttcctagaataaaggtggtaagagaatagatcaatgaatttttaagactgtaagagagctaaagaagtcaagagtgttctcttgaagagggtctgggcgtaggaggctgtgtgctttgggtgaatatctttgctcaggtacttcctaacagaaaagcagtgtgaatgcataacaggtaaactgaggccaggtttatccacatgagactactcataggtaatctgggagccagaacagttattccagtggaatcatctgtgctgacctttggaacttatctttggaaattgcttttatagctggcagttggatccaaattttcagttgggttcaccacacaaaggaatgtctgttttgcaccaggcccaaggttaggccctggagataagaacataataaagatacagttcttacaccttagttctctgaatggggtgtgggggaggagagtggagagagagggactgaaggagagagaaacatatgcagtgaactgtaattaaataacaaattatgtaaaataggtatagacaaaatgaaacaaacactgcctgattttagg

SEQ ID NO: 69947 - DNA, 483 bp, Homo sapiens
ggctggtctcgaactcctgaccttgtgatccacctgcctcagcctcccaaagtgctgggattacaggcgtgagccactgcgcccggccctcaataaataattatattattgtttaatatttgctttgtgtttaatctctctcttgtttgctcctctttccccaacacagtgtcagatgcatagttggcatgcaataaatatttgctgaaagaatgactgaagcgggtccattgaatttagcaataagcagttactgttactgttgaccttggtgagacagtttcagagaaatggtgggggtggaagccagattgcagtgcattatgcagaaagtgggaagtgaggaaatgagggcagcgatgtgtagacaactttttttcttttttctttttttttgagttggagtttcactcttgcccaggctggagtgcaatggcgagatctcagctcactgcaacctctgcctcccgggttcaagccatt

SEQ ID NO: 69948 - DNA, 2147 bp, Homo sapiens
ctgagtagtgcaggcctgctgggaggaggactctccctctgtgctactcagagaaattcattcttcaaggcccccttccagccttgctcttacccagctgggctacagttacaataaaggaaatgacttttcttctccccttcccccagtacctttgttttcctagtcacagggtggggctggatattgaatggagaaattgctggggtccatcctaaactcctcccctcatctctcccttacattaccccattcttctgtctgcagccacatccataatcctgcctctgttagccttccgacagaccctcaggtgcccaggacaacaggaagctacttaaagctggaacctcagactgtgcaatggaggccagtgacaaaactgaaagtagctctgtcagtaattgtgctggtgcgattaggcagctggccagaatcttttggatctcctggacatatggctgactagtcctcccaagccttcccaacaggcctcttttttttcctttttttcttttcttttttttctttctttctttctttctttttttttttttttttaggctagtgaagtgaaattgtgggagtggaaaaggaacaaagaaatcggtaactggtagtgatcaattacttgtaaacactattgtacttggaccagcccagtaggccttttttaaaactctgagttacctctctttcctttccttgagcagtgccattaattctgtatctggggcaatcctttctgatgttctctggacctggctctctctccttaggagaggccaggagagtagccagagagcatgtcatttgtagctgaggttaaagtgtggagctatcaatggtgacctggcctcttggcatgttagcaagccagaggaccttgacaacttttttgatgattgtccgttcaccctgatcaaaggtgtttggcttaggaggagggaagaaaagctacccctattagtcttgatggccccagcgtgggtctctattgcttgacctggttcctagcagcattatcagaaggaaaatccaccgctcttaaggctcctgggaactttcaggacttcctttctcaggattgcaaacataagactatttgagctttcacttttgaaaagcggttactaatacctatactctgggaaagggctaatgcagatagaagactgtggtcactgcatcaggcaacagaccatttccgctaaatttagtgactccaggaaggccagtgaagaaataacacacgtagcaaccagagactgtgttgtaatatgttggctgacagcagggtactttctgtgatgctgaaagccacattcattttctctcccctcatccccatctaagcaagcctggtagaatcataattacagtaataggtaccacttattgagtactctgtgccagacaccctcctgagcatacgacatgcatagcacatttaatccttacaatgacttaataaaatgtagtactagtcttacctacttcgagaatagggaaatggaggttacttgtttaaagtcacagagctaataggtagcatagctgagatttgaactcaggcattcttactccttgcctgcaagagtctcttggcattcttgaatgcaagcatatttcttaacctcactgaggctcagtttcctcttatataatatggggtaaagagccctcaccctgcctgccacacactggtagtgtcagataacattgaagggtgttagtttaaaggcttcatggactctataatgtcaacaaaagtgctgttaactttcttctgggtctcaggctcctgatgtagagtcagtggagcaaccctgccatctgctgttatgctgttgatgttgctgccacacttactaacctaaacctttgattctggctgtggccttctccagaaggtgtttactcatttgtccagtttatcttttaggaaacagccagcccgtagatcattaaggctggctattggacagggggctggggcctgcctgacagaggaaggaagggcagacatctggttcttcctctgcccctacaagagactccagcctgaccacagagtggtactcctaggatgtagcagcagcatatgagcttgaatgtgccttaatcctgctctttactttgagaag

SEQ ID NO: 69949 - DNA, 1852 bp, Homo sapiens
atcaccaaacatttatttattaagctacgttcaggataagaagatgaacaagctatctgtacattcattttctcgtttgtaacaaggtaatgatagtgatctatcctgcctgcctctgagggttattgtgagaataaaatgaaatcaagtggaaaagcacttaggaaaaagaaaagcattggttttcaattgttagtgtggatcagaaacactggggcttgtttaaaatgcagattcttagccccagtctcagcgattctgattctgtatatctgaagtgggactcaggaatcttgattttcaacaagctgaccagagggtccaatgctgctattcctttagttacactttcagaaatattactgtaaatcaaatggcaagaataaaatagttatttgaggcagttttagtatgttggacctggagtccaaagacttgggtcaaactccagctttgtcagttcctagacctgtgaccttaaacagcaaccttctctgtgaaccttagttccctcaggaacggctctggtcacctcctgctgtactccattgatgactcaccacataaggctccctgggagtcccccaaacctttgctctcttaactccttttacagcctcctacatctcctgcaggtgctgtcttctcctcctttttccaggccctgctctgacacagcattcattctcctctgggaagggttccttcaatgtgtctccaagcacatcacacccaggaaggaccctgtggccatatctgtctatcaccagatcaaactacgtgaaggcaggcactaggtactgtcagtgcccagcataggcctggcccataccaggtgtccacagatgcctagtaaagaaacctatgattcaggacccccatgatgagcaactatagcactagaacagtgataataactaatgtttataatgcatcttcagtttacagagggcttttgtactcatcatctagttcagttcctgcaacaacctcttgaggaatatagcacaagcaggacaagggaagcccagagatgttaaataatttatccaagtttatgctgctgggaagggcagcactgaaattaaaagaaaagttttctgagctcaaatcccatgccctttcctcaatgtgagctctagcaaggtattcaggaatcctgcctctacagtttagagcctcaaattgctgggtatgttgagttcttgtatctgatttttctagatttcctgcccacattcttactgtctggatatcaggaaagagtttatcaaatgcctgtggaaatccaagataaggtctcatgatgagtaacccagtgaaaacatgaagtcaagtctaactagtcactactatttcactactgctgactcctgatgatcagctccttttctaagtgcttactgtccacttattccatcatctgcctagaatttatgtgaaggaatcaaagcaaaaggatcataaggcttcctttttccagtatgtttttcctcctttttgaaaactgggccagttagctatctccatttttatttcatgaatacatccccagcgcctggtatatagtagatatggaacattacactttggagatattgcacccattctccagtttctccaaagttactaacaatggttccatcactgtgccaacatattttcttttttcaatatattgggaaataattctcccagtctgaaaatctgaacacatttcatgtgacttggtatcctcatatgtcttgggcttccaattctccattcctagtttcaagttcatgaactgtaaaacaaaggattagactaaatctctaaagttctatccagatgccaaattcttttctctttc

SEQ ID NO: 69950 - DNA, 521 bp, Homo sapiens
agcagcttatcacatctggtgatcaatccttcaaaggttcctcctgaagtctgaatttttggaggtcaaatggattccacctgggaggggcttctgcttcaactcaggacatggggagaaggctgttcctcttccagggggaggcagttttcatggcattgagatgtcctctcacttattccccacccacccaccaagtcctttgtaagaggagtagggggagaggagagcgcctgcagcctcctgctcacattcctagacaccgactcactgagcccgtcgccgctggaacagcagagctgtgtgaaatgtcaagaggagttatgctcataggctccctggcctcagtctctttgtggcttgcatattcttccattagtactgtgttcatcacatggaaatcagagggtacaattaaaagataatttgctagtcccagacttaatttggggcccccttcttgcctgattgaattacaggggaacataatagatttttggtgagaaatagttgtctgtgtg

SEQ ID NO: 69951 - DNA, 1075 bp, Homo sapiens
ctccagcttccttattttcacaggtgagaatcctgaggctcagctgttgagatgtgctgtctcactccggtgacatagtacagtggatgtggctttgcagccaagcacacatagcttcacattccagctccatcaattatgtattgggcagctttgcagaatgatttgactttaactctgcttttcagtcttctgtaaaacagggataatcctgctaccgtagggttgtcaggattagagataatataaataaggtacctcatataggacctggattatggctggcattcaataaatagtagctgttaattgatagctaagctagaactctgaagtctaccatggcaacttcttaagtggtctgagaacccagttgtgttctgtggcaaaacacagcttagggatccatacccagccctcctgtcagctgttcaccttccagttcttcagagacatgtgtggcagtgactttggccacatagctggctgtgccctttaaaggcattccttgacacagatatgtggactggtgacgttgctctccagccaggtgttcttcccagcaggctggcctggctgtctcctgcatgcctgtacttgtttgtctccctgctccctctcctgggcctggccagagctacttgcagcaaacaaaagcaggatattggcaatggaaaggagggtgtgttctggtgctcccatgccctgcggcgcacataccattgcaagggcgtaacagagcccaggcctgcatttgggtgcaaataagtctgcacacagaagaaaagaaggacctggtgaccaggagccatggaacccttgtgctcccctacctgggctactggttcttgccactcctaccattttcagtttggaaatatttgttaaggctttgctcttccaggtcctttgcttggtgctgagtctaccaagagtaagtgggatgctgtttttgtcctcagggagctaacagtctagtgaagaagaaagatggttgcccaggaacttctaagtcagaaggcaggaggcaagaaggaagcccctgctcctactgccagccctctgttgggcaccc

SEQ ID NO: 69952 - DNA, 2559 bp, Homo sapiens
ctttgggaggccagacggtcggatcacctgaggtcaggagttagagagcagcccggccaacatggtgaaaccccgtctctactaaaaatacaaaaattagctgggcgtggtggtgcacgcctgttatcccagctactcaagcggctgaggcaggagaatcactgtaacgcggaaggcggaagttgcagtgagccgaaattgcgccactgcactccagcctgggtgacagaacgagactccgtctcaaaaaataaaaaataaaaaataaatgctttattttgattatcccatttaaacctagaaaactctcttgctgctttgggagcaaaaagcctgcgctctggaatctaagaaacgtgaattcaaatctgtcccctgccattgcctttggtaaatcgcttaacttctctgaagctcagatgcctcaaacgacttcttcccgcggtgtgtgtcaggggaggttggggagctggggttgtgagcagtgtgggtctagcacactgcagacgctccgcaaacggtcaataaacgctgaggggccaaaagccactcctcaggacgcgcggcggagagacctagcctcaccccagcctcgccccgcgcagttgtttacaagcgctcgcggcggatgagctcatacgagtggcggcggcggccaataggctttgagccccgcggcctggagacagccctggccaatcggacggcgcggaggcggagcggggccggccggcatcgcgcggccgcacgtgcgccacgagtgtctcagccgcttcctgtcagcgccaggagcggggattcccggggtcccgggcaggtacctggacagcgcaggtcctcgcaaggccgtttctcagggacgccggcctcgccactgacgtagcaccagggcccgcgcgggtcctcgtccgggtttcggcagtaactgtgattgccggcccctaagagaggagagaaggaaatgtgtgccggggctggcaccgggaacgcggccgccgcccgccagccccggggccgtcccccggaggacacttacccgacacgggggccgaggccagcccgctctgcgcgtccagccagttgaggcagcggaggcccggcgcgggggaggtctggtcctcccggtacaggtggccgttgtcccagaaacagcctgtgaggaaaagaagcccccggacacagaatagcgggcagcgaacggaagacgcccagcgtggcggacaggggagccgggaccacccgggctgaacctcagcctggttaggggaccccgggccctgctgggcctccctctcctctcgtggcaacacccccacgccccacgcaccccccccccccaactccacgcacacctcagggtgtgaagcccccagcctgtgcctgtcccccagtcaacgctcagagactgttaggttttatttatttttgaaacctggaaagcgctgcagaagtgcaaagcgttgttactcttgaacttgtgaccactttggaggaggagatggagaggaggaggcctggcttagggtccctttgaggagctgggagttttgggacggggggcgcccagacgtgacatttgtccctgtgttgtaatggccacgttacataaactccggtgtttcctccttcacggatacggccaccttctgcccgtttaaaaggcaaatactccctcccaggagaattctccaggagccttgactccgtcaggcaaaagattcaagacagcctcaaacggaggaaaccggcctcatcgctgactggatgagactccaagctcccactcccctctgcaggagaaccacagaaggaggctggggaaggaggaccacaccatgcaaagggcttagaaagaacaggacttggggagtaggggagatgaacccccaagctccatccactcatgagcaaggaaaggcagagagaaagtggcttcttgcctttgttcttaatggcaaagatggagctgcaagcccctgacaaggaaaggaggggtggaaaagctttcacgggacaacagaaaccggctaaacgcttcgtttcctgtcatcctggccctgtttgggaaatagggggctttaccccttctgtttcatgaagttgctgcggaaaggaaagattgtaatctcacctccagatccataggcttctgctaggagcatgttgctgacgaggaatgcttgtacccaggccaacagcatccttgcctccttcgtcttgcaggtgattgaacgaccagtgtttaaccgaggcccccttggcggcggctctgcctcccagtcccagccttgcagtcagacctgcccttgttatgctgttctggtaaacagcctctctttagaactgggagcttcccagctagcttgctgcagcgcgagctgtttttcagctgaaaggcgccccctgggtcctaagcctcctaggtcatgcaaaatctaactgagccaagaaaggaactcagccaagagatatgcaggttgtgcttagcagccgatcagtttgagacctgcgaggccgcatccccagggtttttcatctcttctgtttccatttgtgtga

SEQ ID NO: 69953 - DNA, 956 bp, Homo sapiens
catttattgatatctgatgaaatgctcctccttagattttgaagggctacttttgctggattgtaatacttttccctctgattacggtagagacaggctataacaggccagcacttgtactagtttcagattatctaccatgcctatgtagggatgctagtatttctacctcagaagcccaaggcttctttacctgttgctgttgtcatctaattttcctatttaaaaaatactattttccctaacttaccttgatactcagcaaaaccatattttgtgtcatgtgtcttatcaggaacagcactgcctagaaaagatacaaagccagaagatttttttcagcttagtcatgtctattttttctcccctgtaactaagacatttatcagcatgattgattggatttttttagggggcgagggaatgaaggacttgattctcagtccttcagagatgtactctaacaggttcagtaccttccttcctcaaggcaatcagatttggtttagaaatgtgcctcttgtctttttctgatgatccagatttgaactttgctccatttattggggcaagatggccatattttatggcctgtagttagcgcagacttcagatttcttctgaaaatatcacggcaataataatgtgatacagtgctactcaaatacttaaattttgagttgtttatatccttgaagacaacattgtgaaacataatactcatatcctcagtttcgtattagatgattactaatccagagacaaagctgtgcgatgaaatcaggaaatattctccagagtgtttcccaagaaggatgggcacttcattttgttaacaggatatgttagtgagtgaactctaataaggaagttataaagctgttaaaaggcttaagaatccttttttgtcagcaaaagagggccaaagtgttggtaaaaatctttggaataagacc

SEQ ID NO: 69954 - DNA, 638 bp, Homo sapiens
caagcaatttgataggggactagtggtgggaagactggacagaaaattagagtaaaaactcaagtgagtgaggataggctagaaggtaccaaaacaaaggcaggctggcaggaaggcacaaagaagctttaggtctagccataaaattcatgaacattttgagattgtgtgaactcggggtgggaaatgagttgcaaagttgaagtaagaaaccagacctcaaatccagatttcatagcttataaagaacatttttagtaaacagaggagttcaaggatggagtccagtagctctaagctgttagggagaggaaataggaaaggaaagtccccggtttggagccggagcagtgaactttggcatggcatgataggctctgtgggttaactttaggaatgcagcactttagccccagttgttggttgctgtgtcttcagcatgtaaaaacactcatttgtgtatttcaagtgcaccaaaccctgattgcaatgtttggcattaattacttcactttttttgttttctttgtttagagacagggtcttgctatgttgcccaaggggacttgaactcctatgctcaagcagtcttcccacctcagctgggactatagatatgcaccactgtgcctagcgta

SEQ ID NO: 69955 - DNA, 543 bp, Homo sapiens
gtgttgcccaggcgggtctcaaactcctggcctcaagtgatctgcccaacttggcctcccaaagtgctgagattaaaagtgtgagccaccacacccagccggttctctgtaacttaaatgaggagaaaattacctgggccttgagaaacaacttttatcctggacctcttttgtctagctgaaaaatctaaatttttctggctccccctgctggtcgctcctgggcagttgcgtacaagtgccctgataggattggagccagagccaagtttgggaagggaaaacaaagcattgttggtagagtgccctgaccagtccaggcaggtttgaggaggaggaaagcagcttgttgaaaacagttctgggaagtgcagctttctgtgtaaagggcaaggaaggtggcccactgccagccaaaatcaggagagcagggattggggctacagcttcctggtctgcagcactgtagaccatgagaatcgtgaccacacgagcccataagtgagctggtcattatgtgaggatcagaccctatcttgagaa

SEQ ID NO: 69956 - DNA, 2488 bp, Homo sapiens
ggccgccgccccctcccactagcccggccgctgcacctgcccgccccctcccttcccctcagcagcgagaagcggggcgcagcagacgtgtccacactccccacacgtgccggcccgaggctctgtagtctcgcaggtgcgccgagtgtacacgcccccagcccggatcagactgtctagactgcggggtgcaccaccccccacatagccaacccccgccctcgctggactgcgcgccactctctcctctccgcccgcccgcctccccttcccggtctaccttccgggggggtgcgcgagcgaagaggtgcgcccctcctgcaaacgcgcctgccacctcccctcccgcccgccaggcggcgccggcgcgcagccaagaagggcacgcgcacgcggggaggagaaggaggggtccgccgcgcaggcgcgcgcgcgcgccgcggcttttcccgggcccgctgggggcgcgcgctgcgtcccctgcaaagcgcgagccggggcgggggcgccggagcggaggaaacaaaaggcgaaggcgaaggcggcggcggcggggcgcgcacgggggcggtggcgcgggccgggtcccggagcctggagggcggtggcggcggcggcggcggctggagcgggcgggcggcggcggcggcagagtaggcccttcctcaggccgggagaaggcggcggcggagcggcggctgtgcggccccgggctccgtgtgttcggagcggaggaaagatggcagcggctgcacttcctcttgcactttcacccctggggggaggagaaggagggggcgataccaacaacaccccccctctcgcttgcagaaaaaaaagaaacggcgagctcagagtgggggccccggcgtccccggccttgcacgtgcgcgcccggatgcctagcccgggccgcctggcgctgcaaactttacactttctttgtgccgagcgcccccccctcaccaagacgaggatgcacgtccccccttccctatttatacaccccccccccgcagtccgctccccccgcttcctgccccccctccccattccccagatccgccaatgctagagcagcctgagcccccgtccggcccccgcctccccaccccgcccgcggggccgggggctgcagtctcagcccccccggaccaatgcaaacgaagcgccgagccagcaaaccagctcccactgcccctcccctgcccgctgagagtggcggctagcagggtgggggggcaggaactgaggggtgcggatccgggccccccagcctgcgaagcgcactcgcaggtcgagcgggcgtcgtccacccttcggagccccgctttcatgcgtgaaattcccagaagtcgcctgcgaccgcctccctgcttcaaacaccagagagggcccggggtcctggccggagacaggccgaacctccggagctgcttctgcacccggtacattgatcgatctgatgggctgcgcgcccggaagagctggagagatgaagccagcgtccagcttctcccccaaaccacagcacgccgagctttgtccccggggagcgtgaagtcaccagctccgggaggcgacaatatgagggcgatggacggggcagggacccccggaagccccagcaatcctcagggaagtgggggtgccggaggagtcggggacaccctcaggcctctccaagcccggagcatccccagcgcccgcagccctgtgagacgccgggtgctctggtaatgggccctgccgccaggcctcggcgctttgtccccggcccgcccggggatgctaccacgctagagttgtacaccaaggtttgtcttcccaggaagcgctggcggctgcctttgggccgcctggcgcggagccccaggctgcaggcgccgcgtgtgcgggcgggaagttcccacagttgcaaagaggcagcgaagtatgtgttccaaactttccacggttccaaactgagcgcttccattaagagaagcggtgtgcgggggaaaagcattctgggtattagcatgcaaatgaacgggcccggcttccaactccgctcgggattcccaccgctgcgcgccgagctcgcgcccagccacgcgcgccctgaggcttccgggcgttgccctggcggatgatccgagttcaaaatcgagacctctgccttctggtttcgtgtcctggtgcttagtcacttggcctccctgagattcagttaaactgtttcttaacctgtgcacagggacagcagcacctgtcctgcacacctccgctctagggcatagtacatgccaaactcctgttggagagaatgaattagaggcatgaagaaagttccctggacacgaagccaggagatctgtgttctaagcccagactcactgtcaccttaggctagtgcctccctctctgagccacagctttcttgggcggattttgggaactggcacgttttatttttgagagagctgctgggaacatccacagagaa

SEQ ID NO: 69957 - DNA, 3121 bp, Homo sapiens
agggattttcctgcctcagcttcctgagtagctgggactacaggtgcatgccatcatgcctggctaattttttgtatttttagtagacaccgggtttcaccgtattagccaggatggtctcgatctcctgacctcgtgatctgccacccacctcggcctcccaaagtgctgggattacaggcatgagccaccgcgcccggcctaaatacttgttatgtgcaggaacatatctgattcactctctactctgtccccagtgttgtcacagtgccaggcagcagttggagctctgtaaataacgattgcatgaacaggatggccacccaggactcgggaaaatgagtattactctttggtgcctattgacagttcagggccccaaggtgggtcccagggtgtctttgagcagtaagtgttaacttatctgcaggcctcatataatagatttgctaaggagcacctactcacagagcagtgatgcccttgatattgtcagccaattaattccttaagtacttcaagttaggataggcctgctgatttgattttatctgtcttttaagattgatctttgatcatgtcccattccagctggacctcctcatcttccctcctccattgctaatagtgtgggatctaattacctcatcatcccttaatttatttatgaaaaaggctgaggttaaagaaaagaaagaagaaactctctttggccctttggggaccttctgtaaaagctttcccttctgtttctccctctttatgcacaagaaaacctcccttttttgtctctgggaagttagaatagttcttgtttacaaatttaactaaattaaacttccctcccagggctgggtggaggccagccctgtgggttaagcctggcctgtcgactgtgggttaagcctggcctgtcgactcccgctggaataatcaatctatcaaaacaacccattgatcctgaggcaaaccgctttcaaaaccaccacatagttcctggacgtcctggcttcctcatgacacttggggaagaggagtcttttgaaattttaaattttattattacacaagtaatacatggatacattcgtcttgtaaaaatttaacttcaaaattctgtggaataaaatgtgaaaggccttttctttgcatcccatcccacagttaagagcttctgatgtatttttctgtttaggcctttaaactgcacgttcatacacgtacacctatataaatgtacatttaattttaaaaataacataaatggtatcactacgtaggtgcccttctgctagttgttttcccatttaacatgtcctgggtagccagtcagaccacagatctacgttttaacggctgtaatcatatttcaaaaacaggatagaggcattattcatttatccattttcctactgatgggtgttaatatagatttcaattttttggtattacaaactatgttgcaagcagcagttctctgggaattatccattcaagtatgcacttattttgggctccccatgtgctctactcggggttcggagtaaacaaaaccgacctaaaaataattttgaatgatagaaagggggcattttctttatccaagggggtgaggcaggctgaagatgggtctctactccctccaagaccatggagggcgtcggggtgtcaccccagctgtgaaaaagggacccaggacccgcagatgctggcgaggaacaggggtgcggagcatgagtcggctttgcaccacgccctggggtctccagcactgaagcgttcagtaccatgcagagcagctgggagcgggtcccgctgggcggggccgagctgcgcgcgaccctcggcgcgctcggggaggcccagacaggggtggcctctctggcctccgctcccgcgggctctatgacaccgcactggctcgcgggacggggcggggtcgggtgagggggaggagacagccccacgctttgcgactcgcggtgacccctacgcggaactctctcgcggtaattcgaagtaccgcgcctgcgtgctgcagtagcgcctggtggcggtggcagtttgcccgcgggtgtgtgaagggagacagtgtggaggccacagggtactcgccacgatgagcagcaccttagctaagatcgcggagatagaagcagaggtaatggacgcagctggcggttcactcttagtctgagcattccttctttggtggcgtcgctccttcctgttctcctttgagccgcgtcaggaccgggcctagattccgcgacttctctcagcgaggcccgtgttccgactgccctctgccacgattaggagtccccgactctcctcagtcagggccccctttcccctcgtcccgcgtctacgctctcggactcccctttgcccgggcccgcgttccgcacccctgcaccttaggcccttagtccgttccccctcccagtgtttggctcctgttctgatgttgtttctttccgttttgctctgagaaacactgaatcctgtcccttattccatctctgacttggtcagatagttcaggatctttcctcatcatccttcgctgcgtcccccttattcccccttttcccagtgtctaccctaatgaccccctgattcagagtatttgctcccggtaatcggatctggaagtaaaatgacatctgtgtgggagcagtttattccgcctggatagtgtgtgattccattgcgtgcggccctgagagcgctttacaattaggaaagtggtgtcccagtgttagatggatccaaacagctgcaaatagtagaaaaggaacccgcagacgggtttcagtctagtctgggggcactaattggaatgaccttaatcgtctttcctctttgggctttgctttgctttgtagtgagggaaatgagctggatggaggagataatggacttttactcttttaaagcctgtaaactgggtgtgctaacattagtaggacttggggaaaaaaattatcctctcaaagctgggggaagcgttcactgcttctaatttatggctgtgattcctcccttttagatggctcggactcaaaagaacaaggccacagcacaccacttagggctgcttaaggctcgtcttgct

SEQ ID NO: 69958 - DNA, 2229 bp, Homo sapiens
aagcatcaacatggtaaaaagtagaaggtgcccaattcaaggtatataacctttaagcagctttaacacaagagaaaccaagattagtagctgccacccatggggatctttcaagactggtggggaagtttcccggagtgggggcaggtagaagactggttaggctgggaacccgcgaagtctgttggaaagtgcctgtcacttgccaatggacggcgccagctgccccttgttatccggcgatcagggactggggacggggcccgagcgcccctcgccaggccagccgcacctgtggccatgtcaggggcgccgatggcaaggaaagggcgagcaccggcttcagctccgaaacttggcttccccgggccgcgaccccaacccgcagcccctcacgcaggcccgggcccagcggcctccttcggaggaagggcggagaccgtactcactgaggggcggccggccgcagggaggagggaggccgaatctcccggcccgggcgcttcaagctggagctagcgcaggcccgcagccgtcctccccggcccggcggctcggtccccgccagccagcccgccggctacccgccggccgccttgcgggcctcgcgcccctgcccaccccctgcgggcgccccggcgcccgcgctcacgcacgcgaccccgggagcaatgcgcccgcgccccttctacacccgggagcaccgggcgcgcggtgccccggacccagccgccaccgccgccgacccttactcggtgcctccgccgctcggcggccctttgcctcggccgccgctcccctccccgctgcccgcaccggtcccagcgccgctccccgcagccttcgctctcgcgcccccaccccgaccggcttgggctgtctctcttcagccgccgtaactgcagcccggccctccgcccctcctcttcggccccctcccccttaataactccctccacgcaccctggccccggcgccgccttccccgccgcgcgcccggatgtgaggtggctgcagcggtgccgggcgaaaaagaagcatcgccgcgcgcttcccggacgccagcccctgcgcgggccggggggtgggaaggtggtggcggcgaggaggaggccacggtggggatagcggaaacccgctcccgtgcgcgcaggcggtcgccgtgggcagcccagaggccaccgccgccgcgttcccacgcgcgctgcagggcagagcggacggcacttgggacccgcgactcgcggcacgccactctcccggaggcggtggctagatggggctgggctggcggctagcacggcctgtggcgcgacgaccgctgtatttgcatggttcgcataggcagagaaccgtggggcttcggcagtgggaatttgagataggagattggggtcttccgagccttcccagtgcgggttcgaacctcagctgttttgcgagtggcgtgatcttaggcaaagctgacttaacctaagtttcggtcgtgtttctaaaatggcctctgtaaatctatgaggcttatgcgcgagtactggttgctgcattaaaagacaaacttgtcacgattggctttgatagcgataaaggcgactaacaaattcattgaaatgttgtttccctccggtaacctgaatctgtccttagcctgcacagaaaggggaagtgcgagtggagttggggaaatgagacggcgaatgtcaagtgcttaccacgtagtgcagactcaggctgacagggggccacagaaatgcaaatatgtgagcagtgtgggtaactgcatcctggggaggaagtcctatgtgctggaataccacaagcacccatttctgccctgtggtactgcgcagcgttggtgtgaagcgatacataggcgtgaagtcccgagaacgcaattttcctggttaaaggacagcaacgtctacatttcttccaagaggcctactttgttggaacttcacttcacttgtgaaattagggtgttgggcagtgagtgaccactaactcagctcccttcttgtgaatcttggcaacagaaaacttttcgtttgtattactgaataaagtgtgtttcttacaaactgtttttttacaggcaagaggcagagggaaacacttgcacatcaggcctgagtttgcattctcatctctgccacctcctacaagctatggagagttagtctattgattcttagttttacctgtgaaattgcgaagatgatataacct

SEQ ID NO: 69959 - DNA, 1373 bp, Homo sapiens
ggcccaaatttaaaaatttaacaaaaagagtgcttattaattacattttaaaatgaagggttacaaaaagagatgagcctggcatttctaattcgggggccttgggacctctcccctccaagtgcaagttgtagcaacctgccgggtccacgcatgggcgggtcatactccacgggttccggtttccactccctgtgaaccaaaagccagagaggcccacgcacgagtccggaagtgagggagggaggactttcgtacgcagccgcctcccagctggaacctcatctttagtgctcggccgcgggcggcgtaactcggggttccgcctcggaatacctcccacttctcttgtctaagaggagcagtagcaagctgagctcagagcgaagctggcgagccaaggagataaagaaccctcggtggggatgcccagagggtgcatgctccacgcccctcgaaaccgattctcattgctgctgctgcaaagcaacccgaagtgcgccacctacccgactgaggctgcgcaagccccggggtctgggcggggtggtcctcgtgcgcgccgcgtcgccgtggagacgagggcgggcccgcgcgagactggcgtctagaggcgcgcgaagcgctgaggcgggcgtggaccgcgcgggagttaagaagcaggtcccggatcgccgtataccgccgggttttctcccaacgtcaggcccgatggctcggcttccccaggtacgaggcccggccctaacgtccccaccctcttctgggctcggcctttccggcagtgagcccggcaaggacctcagtcgggttcctccgagcccggtgaaatctgtccgagcctccgcttcctcccctgaaagtgcaggtgatgttgtctacctgcgggtctgtggtgcgggaatggaggaagtgcgacaagagggcgcaggacggggcccggagcctgccatcctctcccgccgcgtcttctcggcttcttgtcttccgccctgggggcaccgcatcctcccaggcgtctagtgcgctcctggccggtgctcgagtccacgcaatgccccttagcgtgcgcggatccaaatcaggggtttcctcctcccggctccgtggcccaggagcggaagggctggtatatgggcgaccttactcccactgagcccgcagggagtaacgcagtaaacaaacctggaagccttccccgcgtgggaggtgggtacctgtttttatgggaggctgttcaggtttcttaactgctgtgtagatgtgttgtaaatatttgttgaatgaatgatgtgagggacttgagtacagccatacctcgctttattgcacttcacagataccgtgttttttacaaattgaaagtttgtagc

SEQ ID NO: 69960 - DNA, 735 bp, Homo sapiens
taaacaaaatcaaaagatatattatggggtggggaaatatttaagatttataacacatgacaaaggactaataaattgtttaggttcaaaaaccccatacatatcactgagtcaaatgctaacagacagtgaaacaggtaatgggtatgaacacctaagccagggggaagagagagtgagtgagagtgtgtgtatgtgtgtgcgtgtgtgtgtgtgtgtgtgtgtgtagaaatgtttaactaatgtttaagtgaaaatttttttacctatcctatttcatttttcacctagcatattggcaaagataataaataatgattcatctttttctcatttttattatataggaagcaatcctcccacaagggtgtgaccctgagaggtcatgtttaaaaaaaaaaaagttaagtacaaaggttattcattcttttactttagctgctacaggccagagcggatggtcatttccagcagagagccctgcctgctgccttccacacatggaacagactctggcgatggcgccaccaggaaaatgtcctcagtgcaagagcaacacgtttccacaggtatgttgcgcagctcctgtctgcactggggcaggtgtttcaaatctaactctgacaaccacacagcccatttgctgtgcttttcagcttcccagaccccaggccctagtacttcctggattttcagtaatgtgggctcattgatttcatctagcaggaaaagaca

SEQ ID NO: 69961 - DNA, 1593 bp, Homo sapiens
tgtctgatgggaagcgcctggaacgccaggaccacccctcttgaagcctcagcagaaacttccagggccccaaatcctgtgtccagtggcctgactgcgggccatgcacttcccccgggggcgagggtgggggcaaggggctgactttctccccagctcagctgaggcctggccaccatgcagcggcgtgcgtctagtggggcgacaaccctgccttccctgcattcctgagctagaagcaggcaaacttcccaagtaggagacggggaaaatggtcctccctgggcgacatggaccagagtcagtggcaggcagcccaggaggccctgggaagagggcaggcaggactcgcaggggtctatcctagccgcccaaagacagggaacctcctctcagacaactctgggtgctgaggggaaccggctctgggcaaaggcagtaagccggccacccgctccctggccctcgggcgccgccctcttccccaggcggcctgcccccaggccctccggcagcaccaaggagacggagctctcagcccgggccccgccaatgccagccggcaccccctcacttcctgcagccgcctcactgcaggcaccccctcacttcccgcggccgcctcacttcccgtacgctcttcacttcccgtacccgcgcccggcaggagataagatgtggaggaagtgagctcacgcagcccgggccgtgcccacgtggggacggaaaaaaagcccacgactcgctcaaccttgtccgcggggctcctcaggccggggccgcgtcgtcacagctgggagagcccacctgcgaccgaaggccctagaagggcacccccacccggcactggccctctgagcgggcagggtggggcgcctccctgagaagtcacctggggctcccggcagggccggggcgccggctccgctcactcacccgcaggtggctccagcttccgggctccgactccctaggggcgctcccggagccgggaagccttggggcgagtgggcggggctcgggctccagccactcagactaccaggggcgggggcaggaggccgaccccagccacccttaaagctgccgccccctctgagccccagtcctgctgggccgtccgcccaacccgagggcccctttaagaggaagggccaaggccagggagaaggggaagggcagcagacaccagctctgcttggtcactgtcacgggaggaccccactcaaccagcaaggtgggcccggctgctcccaagggatgcctcctgtctgtcctcagtctgtccgctggtctgtgagccgcctgtctgcagcccgtggctggcctcccaaagcagctgcctcccctccaccacccgcgacccaacactaggcagactcaggaccccacgtgctgctgacctcactgaggaccagcttcttcactggactgaacagaaagccacccctgctagccctaggaagctccagagaatgcgaaatccttgatccttcccgcatcccatcttgaagctacaaggctgctcccaccccaaccttctgccctccaggcacgcaaaaccctgacaaacagaatgccctgactccaaaa

SEQ ID NO: 69962 - DNA, 2032 bp, Homo sapiens
gggaggcggaggttgcagtgagccaagattgcgccattgccttccagcctgggcaacagagtgagactccatctaaaaaaaaaaaaaaagaaaagaaaaacaaaacaaataaaataaaataaataaattttgtgttcagacttgggtcacatccccaagttatctcagtatatatatatatacaaatattgaaaaatccaaaaaaaaatccaaaacacttccagtcccaagcattttggataagggatactcaaactccaatgtcaactccaagtccagaccatttccccctcataaaatgaagtgttggagtcccacttgaaaatccaggagtggccggtacagtggctcacacctgtaatcccagcactttgggaggctgaggcaggagggtcgcttgagcccaggagtttgagaccagcctgggcaacagagcaagacctcatatctacaaaaaaagaaaaagaacatcaaggagtggttctgtgaccattttattcaatcaagaagagtatctaacttaagcccagttctttaccaataggtgctttgagatctcacactgcattaggccactgtactccagtgtcctgtcactttccaggccctgggacttatgagttaatcaaccctgtcctctttacaaccatcttccaggtctgaaactatgtatggcaataactccaattacataaacagcagatactaaaaaactactggcgttggtcttttatgattttggaagtggcaggtttcttccaaatttatattcttttgggaaacctttgaagtgtgtgggaatttcttgaaagcatgcaagctcatcacagggtgagtcagcctcaaaaatccccaaggtcagaaagatgtcagcttgggtttaacacttgaggggggtcatgcagtcacagtcacgtgctacctacactttacaagtactttactaatctactaatctaatggaaaatgatgtttacaggggaaaccagcaacgccacagggaacagagggcagcatactttgaaagtgtgactcacctactacataattacccttcaccaaaaggaatttgtgatatagtaccggaaaacttttttttttgtttaaggtaggttattacaaagcccaaggcgtacgaacaggccaaagggtaggcacatggacatacagggcaagagcagacaggtatctcttagggtaactcccatagctggatctgtatggccagttgactaagtcacggttttacaggactgttagaaatcaagtgaagtctgtatactagattctattggaagaaaatggtcaaaattaaagtccaaaaaaggattttggaaggaaacctataatgtagcatgtaatgccaatggcagcaaatactcctagataaactgttagagctggatggaatctcagagtcatgttcgaacccaacctgctgttttactgttaaagacacaagaccagacagaaagtgacatgtcccagttcacacagctactgcggagcatggttgagacttgccttcagcatcctaatgccccagtcaccgtatgtcctattagaatagattcagctgatctggattagcaaaatggagtggatcaccactgcattccagatatcacaaagcctcaactgtcaccccctcttttgcccagaatattaagacctattactggtcctttgatatttcagattttttatttgttaaattatggctgcaaaaaaaaggcaattgttaaacttacacctttatattcagtttcacaatttactgaatgtctcctctaagtcaggaatcatcctgggacatgggaagcacagatgaacaagatgtttcattacgtatcgtgcattccgtaacaatgcaggctgcccctatcgtgtgactatgatggaaggaagcattttgagcaataatgacaaaggaatttgattatttctgtctggttcctggtgagaactaatccacatcacaaaagctcaatagtttcagccctcttctgactaacaagggcaagaatagcag

SEQ ID NO: 69963 - DNA, 1393 bp, Homo sapiens
taaataaataaataaaataaaatgaggttgccaaggtgtgtccaaatccaatatgatgggtgtccttataaaaagggaaaatctagaaacagacatgcacacatggagaataccaggtgaagctgaaggcagagattggagtgatgcttctatatgtaaggaatgccagagattgccagcaaaacattggaagctaggcaagaggcatggaacagattctccctcacagccctccaaaggaagcaaccctgacaccttgatctcagacatttagccctagaatcatgaggcaaatgtctgctgttcaagcaacccagtttgtgttgctttgttacagcagccctagcaaactaatacaacattattagtaatcagggaaatgcaaatcaaaaccacaatgagaccccttcacacccatcggaatggctataatcaaaaagacataatgaggccgggcacggtggctcaggcctgtaatgccaacactttgggaggccaaggtcggcagatcacttgaggccaggagtttgagaccagcctgggcatcatagcaaaacttcatctctactaaaaatacacaaattagccagtatgcacacagtctttgaaatattaaaaaaacaacaaaaattaacaataaaaattagccaggcgtggtggtgcacatctgtgtcccagctacttggagaatgagaattgcttaaacccaggaggtggaggtttagtaagccgagattgcatcattgcattccagcctgggcgacagagcaagactgtctcaaaaaaaaaaaaaaagaaaaagaaaacctaacgcttcagtgataactgcatgccaggtactttccacatactaactcatttaactctaacaacaaccctatgtttatcccaatttacagatgaccaaactgaggcagagagagggtcaccaccatctctaattgctccttacctgtgcgaaaggctctaaaaggcagcttccgtaagggctgtagggattggctcagggcagtgatctcacagggatggaggctataaccaagcaaaaatgaaccattaaatattattcttaaaattaaaattactggattaatcggcaaaatttaaacactcaataacaatattgtagcaatgtaaatgtcttggttttgacaactgtactgtagataagaaaatgtccttgtaggggaaggactgaaatatttatttatttattaattcattcattcattcttgagacagagacttgctctgtcacccaggctagagtgcagtgccgcaatcttggctcactccaacctctgcctcccgggctcaagtgattcttctgcctcagcctccctagtagctgggattacaggcacccgccaccacacctggctaactttagtat

SEQ ID NO: 69964 - DNA, 756 bp, Homo sapiens
gcagcatagcactattgtagctaacatgatgaatctgattctcctataggcaaacaaggagaaaaagcatcttaccatgacgagcaccacccccaaggccagacagctattaacacaatgaagggtatatttcagtatatgaaagttctttcagttctgaacaatgttcatttcttagactggatactcccactgccacagcaaaaagcctaaaaccctgctttctaaacagaattttaacgagaagtgcaaaaacggactgaaggataaattgttgtgttctgtacattgccgcattgtgttttccagaatactgaaaaacccctaactgaaagaatgtttgcacaatgattaacaaggctttgtctgacaggaggaaataggaatgggagatgatcatttatgtatccaccgtaactggacacagggcactcaggtggtttgttttgcatatccatcttccccctcaggaaccctgcccaagaacaaacagctcagctttttgtccaccgctgtagtcccagctgctggaacaaatactgggaaatgcttcattatatcagtttggtacatcagatttaggtacttcccttttttcacataaaacttccttgacttataaacacctagctgagcatggtggctcatgactgtaattccagcactttgggaggccaaggcgggtggatcacttgaggtcaggagttcgagaccagcctggccaacatggtgaaaccccatttccactaaaaatac

SEQ ID NO: 69965 - DNA, 3212 bp, Homo sapiens
agcccattcttttatcaaatgagtttaggaaacatggccctaaattatcacccaagatgttatctatcacctgtcacacatcacccagttattgaaaaacttacctgaaatataaggttttcatttacatgtctcacaaataggcactggtttactaaaaacccacagaaatgttatctttttggtttgtgtattaatatcatttctatcttgatatagaatacctttgaaaattaaggtttcttattgtacccaaatcttcatctctctcacccactgcatctaagtctagccttatctatctacactggtactaaaacatagctttttttctttcccttttaatgatggtgactgaggtacagcctcctctcatcatttaaaaaaattattttaggtggactgcgatggctcacttctgtaatgccagcacttagagaggtgaaagtgggtggatcacttgagcccaggagttcaacaccagcctgggcaacatggtgaaaccctgtctccacccccacccccaaaaaaaatgcagctgggcggggtggcgtgcacctgtggtcctagctactcaggaggctgaggtggaagaactgcttgagaccaggaggtggaggctgcagtgagccatcatcacaccactgcactccctcttgggcaacagagtgaggctctgacttccaaaacaaataacaacaacaaaaaacaattttttaagagtctcattttagtcctttcaattcgtgacacactttatttatttttaatttttttgagacagagtctcactctgtcgcccaggctggactccagcggcgcagtcttggcttattgcaacctccgcctcccaggttcaagcaattctcctgcctcagcctcccaagtagctgggattacaggtgcctgccaccatgcccggctaatttttgtattttttagtagagacagggtttcaccacattggccaggctggtctcgaactcctgacctcaagtgatccacccaccttggcctaccaaagtgctgaggttacaggcgtgagccaccgcgcccagcctgtgacacactttaaatgaattcagggttgactcatacacagcacgcctggtaataacattgaaaacaaagtctcctgcccaaattctaacagttaccaccacaatgcagagccctctcctgagagataatcatttctgtacagttaatgatgaaagagtgacgctttcataacaagaccaatgatggtttctgttccctctcagtccaaatccagtgtccgtctcctcccaaaacaataggttatcctctgatcaacgctgacaaaatgaaccctgtaggaaacacacaagtatggcgcatctctcaaatcttagctctttgaaatgacaccaggcagccgactctgaatcacagctacattttaatccattttccgacactccaaatgctctaagctattttctgtataaccactgccctcacggcgggcagcctgagagaaagatcgtcgcgtgagggggtaccttgatgggggtccgggctctgctacaaactggctaggtgaacttgagcaaatccctccctctctcggagcctcaatctcattaactccaaagagagacagctggactcagaagacccctcaagtctcccacatttctaagaatctaacagctgggggtcacaagggtaaccaagactctagccccataacatattgttttgagattacctaacctaaccctctagcttcaaagactaagatccagaaatgaaagttgcctgacactcaatctagtgtccttcccacaggacatcattccttctacgaaaacgaacacacgagaaaatggcatctgaacatctgaaagccctgcctcgactcaagagacgggcaggtagcctatttcatctgatttttgtccctcgtgaacttccacctagctggaaagggcaaagcgcgagcttctaggccacaccctaagtaaatccggaccgccctacgcaggagcagtcgcacctgctcctaagctcgaggtgaaggtggctccgtctccacccgagctcgcctcagagcgagcccgcgacacagaaacatctctcttcagaccccagcttggtccaggttgccccacgccccaaggtagtctctccgcgctgctatacctgctccgccacggcgcgaccccgtgcagtaatcccagacatcggtgccccacggacgtcgccatcttgtctgctccttctcagcgtgccacgcccccttcacacgctgggcgcacgcttaaggcgtcacgagtctcgagttcagtgggccaatgagaaaagcgcgggttgggggcggagccgactaagctccgccctgtggctactccccacctaacccgcttggcacctgcggaggtaggggaactagtggagctgtaggtttcgctaaacctgggcttggtcgcagcactgccactcctcctccttccctctgggtgcctttcctcatgtacctggaaaatctgagtcatccaagatccaagaatgtcgtttcaagtgatcgaacttgctcattttacggatggggaaactgggcatccatgactcagctctcgttttttaagcgccggagtgtgttgtgagcactttgcaagcatggtgtcatatcattcttatctcctaccgctgtgctgccagggagaccgggggcaaacggtcttggatcacctagaaatgcaaccagtcgttaaattcggtgcctggtgcttgctcttgaaaaggttcctatcttcaattgtaagaggaaaacgagttttcaatcatgtctgctactttttactgagcactgactagagactcgcagctaggcccgagacattatccccattttaaagatgaggtacctgaggctcaggaaggttaagcaacatcttcaagggtacataaagggcatatgcccaaagactataaaatagtgaagccagaatttgaacatacgtctctgactccaaaaaccatgtcctaaacatcttcttcttttttttttttttttgagacagagtctctcattgtcgcccaggctggagtgcagtggcgcgatctcgattcactgcaagctccgcctcccgggttgacgccattctcctgcctcagcctcccgagtagctgggactacaggcgcccgccacaacgcccggctaatttttttatatatatttttc

SEQ ID NO: 69966 - DNA, 1016 bp, Homo sapiens
agtttctcctaccctttctattccatttccattcccccattctttcaggataggtaatcaaattcattagtttctggtttatccttcccatgtgtacttgtgtataggttttatacaaataagcagatacttctatatatgcttatttcctcttctttcttgcatggaaaggacaacactatagatattgatttgcattttttacttaacagcatatcttagtttacagaagtgagtcaacagagcaggcctgactgctgtccttagaaaggtctacctgcagggtcagccttagctagcatctgggaactagagtttgggagtttccaccattccctaaacaggagtgtctcactgtgcctacactataacgtggtttatgctaaacacctgctttccttctaggagttggaaattttgctatgtgccaggcagaggatgtccatgcaaccagtccccagtaaaatccctgagcactgacccactaacaaacttccatggtagacaatatttcatacgtgttgtcacaatttgttcctgaaggaggttaagtgtgtatgactccactaggaaaggactcttggaagcttgcactggatttcctctggactttggtctatgcctgcttcccttttgctgattttctttgtatcctttcactgcaataaactgtagctgtgagaacaactaaatgctgagtcctgtgagtttcagcaactctgaaaacctgctggttttggggacccctgacacacctggaaatcactccatatcagtatatagagatcttccttgttattatagctggataatactccatgtatgtaaataccttatgccataatgtattcaatctctctcctatatatgggcatttaggttgtttccaatattttgcaattaaaaactgctgaaaagaacaaccttgtgtattaagtattgttatactgctagaagtgtatcttttttttttttttttgagacagagttttgctcttgtcacccaggctggagtg

SEQ ID NO: 69967 - DNA, 1470 bp, Homo sapiens
aacagattaagtaatagtaatagcaacagcttaccaaaagcttactatataactagtatttacacaaatgctcccttagcccgcatgacaattctaagaaaacagaacccaaattggagatggactgagattcagacaagttaaacaaatagtcaaggtcacaaagacgttaagtgagagacccaggtttgcaacgattacactccaaaagccatgctcttaataatgcaagggaaaggagctcactgcacaccaagaggcttaaagggaagaagagaagcgagggtctctctgtggacatcacgaggggagagggagaaaggttgatttctgataccataaagtaaaatttcaaggtcttcctctccgtatcttggggtacaggcgaaaaataaaggaggaaggtaagtctctttcttactgggaagaaagatcccctctgtcactttcaggcaagttgggtctcactcttcacctgggtgacgctgaccaaagttgggggaaaggtctcatttaggggttatcttttactcctcctcaggataagttcagaatccccctcgaaccctgggagtgggtctccctctgctgaccaacggatgagcgctaagaaagagcgtacgcctccgataaggggcgtcgtcctctccgaggagataagttgggggatccctgttgtatcgaggttgaagaggagtctctctcccgcgtcggagccatgactcggagaagccgcttttctctagcgacgcggggcctggtctcctccctctccctgggtcgttccgccgcccacagggcagccttggttcctttccgcgccccgagagggcggggggcctggactcccctttagcagcaccacccggcggagggtccctttagggcggagtggggcggggcggctacgcccgaagccttccagtcccggcctcttaccctgagacctcctccgcggcccgcgcttgcccagccagctcagcccctgcagctgcagccccgtcgtcgccaggtctacctgagcctacggagccgacagaggccgggggcgctccggccgccgccacctcttcgtctctatggtccccctgcacttcctcatccggggcccgagccagccatgcggactcgcccaaatcccgcccccgcaccgcgcgcgcgcactccaagggaaggctcttcctgattctgacctcccgccctctgctagccccagcctccctcaaccccgcccctgcggctcaaactcttaaagggaaacacaacttttggttctgctcctgctgagccacaggacccagtgccggccttcgctgctgtcaccctgttccagtccaccgtttttctagtctggacggctacaattctaagggcctgcctgcttccactctggcagcccgagagatcttattctactggaaagagtgttttgggtcatgacactcctctgcttcttctaatcacactgac

SEQ ID NO: 69968 - DNA, 2720 bp, Homo sapiens
ctgaggtgggaggatcgcatgagccaggcaggcagagatggcagtgagacgggatcatgccactgcactccagcctgggtgagggtgacctcatctcaaaacaaaaacaaaaaaacaaacaaacaaaaaaattgcaattacttaacacttgcattatttacctaacttctcctgagtcccaacataaaggcatccatgcttaagaacgttgcttgtcctgtcccagggtccccttggtccactgcagaatctttcactacagtgtaacatgttttttctttcaacatttttaagttttccaaatccgtaagaaatgggcactgttagtattaaagatataaagaaatttaagacaagtgctgtgtcgtttagatttagcagtcagtgtgattagaagcagcagaggagaggcgtgacccaagacaccgattctagttataaggtctctctggcttcaagaggggaagcagggagtccctatcgagttgctgccgctcaggtcagaaacggtggactggactagggggcgggggtatcagtggcagcaggcggagctggcaattgtcaggagtccttggccagagcctgacccagcccacccagctctctggttttctgcttggagagaaagatatcctgacagacgcgagtttaggcagtgccctgggtatgaccaaaggatgttggttaaaggccccgttctgggaacgggtcaggattcgtccttgcttccttctgaagggttttgtgtcctcaggctgtttcctggtttgtgaaataggatagtatctgcctcctgcatccatcaggtaatagggatgcaatgattacataaggactatgaagccacggcagccattcttattaataacctgaggggcgcagaacgtcgtttagagtttgcaagggtttgaaaagccccccgtaagtggacacttcccagcagaggccatcaccctaactctcgcgtgctcagccccttgcattttacagaagtcctcccagaaactctcgttggcgcctcttagctgcccaatgaggccacatgagtcattaacctcgttcatataacagaaaacggagctctgacggatctcgtttcccctgtggggagatcactgagtcggaaacgaagctctgtggccatggatctacttcggatagactaggaggaaatggatttcctccgtggggcgggaggctctagtgctcgagggcaggaaacgccaggaggtggcccaaggaagaggccgcacacgacgccccgcccccggctcgagccccggatgaggaagtggtgcggccaccgagacgagacggaggcccggcgagagcggcgcgggggcgcgagggcgggaaggaggcggggccccggggcggagccaccggagcggcgcgggttctcaggtgagcgctacacggtcggggcgggcctagtaggcgcttcaggcttaggggcggaacagcgcgggccgcgcgggcgtaggcggggtatctggaggaggcgcagggaacctggagagggtccagccctcagtgccccggccagaggcgggaaggggctctagagcttcggtgagtggagctgcccgccccggactggggattgggggggcttgagataggggaccttggcccaggttcgagttccaggctccatccccattccgctgtgtgaccttggacaagtctctctccctctctgagcctcaacggcctcagctgtgaaacggagtcagggaaggtctgctgagagttcgcacagaccgaggtttggggaaggaacttctgccttcctcctctttgtggttgccttgctcaggacattggcagcaaaacgagaatggtgggagtgtctcttaagtctcgagtgaccttgagcaagtcccttgcccggagtcacactttcatcatctacaaaatgagtgggctaacctcttttaagatctctttactatttgggtgttattggtgtagatggagacaaggtgatgagcacccattcagcgcaatgcttcccctatgggggtgtgatagaatatcttctcctaggtttgactagcccctggcccgaattccccttagttcctggattctgtggttctatttgttctccatcgctccttgtaactggaggagtgacttcttccgagagtcacttggcaccacttcacagcagaggaacaccagtatcttcactggcctaaaatcaaagagtggttgcaaggaaaaatctgacattccaaccttttcgtttgtatttctgtggcagggaggcaagatgacttctctgccccaagcttggaacagctaaagggaaaaacagtgcaagatgagaacaacaaaggtctacaaactcgtcatccacaagaagggctttgggggcagtggtcagtatcgattggtctttagaggttttgtaagttggctgaggttctggtgtgtgcaatacctagaaattacacactgactcgtgtgacaattgaggctaaacaggcgactaaacagactaaagcagcaactgtcatacagtaacaataggaggatggcaggacccttctaatgcatttgcattcagacttttaaggaacattgtgaatgctgccggtttactacccttcatttgttgaattgcattattaattacaaatcttccgtgtatgttccataaaattccagcctgcactggtttggcagataagagaaactaaaatcgttta

SEQ ID NO: 69969 - DNA, 1300 bp, Homo sapiens
tctcttctcattctgtttttagtgatgagagattaatcagtgggattaggtggggtcagcctggagcagtcctttctttacaactatgatcctaggactttggctgcataatgtctgtcatttcccccctctcttatataacatctcaagctgttaagggtgaagtaccgcatacaggtttcccacttgtagatcacactggggatttttgttattgggttccatgtggcttgggctggtgatgggttttagttttaactcaaggtaggacagcatccctcgcttgatggtaactttttgtctcttgcctggcagatctgtgcgagagcgagagagtcacagtcgaaagagtgccagctcctgtgatgtttcatccagcccttccctaccaagccgcacactgcccactgaggaagtgaggagccaggcttctgacgacagctccctaggcaagagtgccaacatcctgatgatcccacacccccacctgcaccagtatgaagtcagcagctccttgggatacaccagcactcgaggtaagagtgctgaagcacagacagagccagggacatctttcttaatatagtgggtgactggaggtgggaggattggtcagaggtggggtgtaaatcccacatcttaatgatttctttgccagtgcagtaggtacaaatcactttagctgttagctatgtatatattatacttcttttttttttttttttttttttggtgacagagcacctaggataaagtgcagtgatgcaatcacagctcacctcagtgcggccttgaactcctggactcaatcgatcctcccacctctgcctcccaagtaactgggactatagcatgccaccacacccagctgattatcatatttttttttgtagaggtggggaagtgcagtgatgcaatcacagctcacctcagtgcggccttgaactcctggactcaattgatcctcccacttctgcctcccaagtaactgggactatagcatgccaccacacccagctgattatcatatttttttttgtagaggtggggttttaccattcccaggctggtcttgaactcctggactcgagggatccacccattggcctccaaaagtgctgagattacaggcatgaaccaatgttaccgcaccctgcctctattatactattttttgtttagcctttcttcatccatcatttaactgtatgcctttccatatgttaatggaaagcttttcttaggcctagggtcaaaagggtttatttccttatgatttccatttgtgccatatataaaa

SEQ ID NO: 69970 - DNA, 2898 bp, Homo sapiens
gattcctttttttcaaagacttgggtagtctttttctccttgcttggtttttaagtgactttcctttcaagccatcctcagttttcatggaacatgttttgccttcttcaaactcactaaactcttacccattcgagaaaagtgtattgaactctaggcactgtgctaaggcctgagaagaaacaaaaactactaagacactgactctcccgacctcaaggagctctgcttcctcatgcacttgggattctctttcaagcaattcccatgtggggtaatgacgatgaaaggaaagccgtcttgtgggggattgaactgtgaatggtttcagtgtggtttgaacatgtgatctctgctaaatgaggatgtgctagatgagggagtgtgctgtgatgaaaacaaccaggatcagaattccccctgcccctcactggactttcaagctgaggctcaggttcttcatctgtgtaatgggcataaagatcctccccttcctgactgcctgtcccacagagcggttgtctggatcaaaagtaggttgggtacattatgggctagattaccacatagagtccttgttttgggacaaggtggggtctgaattcacaactggttaacatttcattcattaaaaaatcagagaagactggcgcggtgtctgacgcctgtaatcccagcactttgggaggccaaggcgggtggatcacttgaagtcaggagttcgagaccagcctgaccaacatgttgaaaccccgcctctactgaaaatacaaatattagctgggcgtggtggcgggcgcctgtaatcccagcgacttgggaggctgaggcaggagaatcgcttgaacccgggaggtggaggttgcagtgagccaagatcatgccattgcactccagccagggtgataagagtgaaactccatcccaggggaaaaaaaaaatcagagaaaaatccaaacagagaaaccttatctgtgaccctaccttcacctctttgcaccatctgcaggcactcaagcgtgactcagtctttctcctgcatttggacatgattcatatgtgaatcatgattcacaggagtatcatctctgtgggtttccctcccagccccacagaatttcatttggagtgttgttggtggggacctggtagctgcagtcttcacttgtttttcaccctgctgcccagcagagacagggcagttggtgtgactgggcagatagtttttatccctctgtatctttaactgggcaccattttagaagacttgctagtaaatgtcttcctttattggagttaaatcattttgaaaaagaaaataagtggatgccatgttttctttctctttagtgttgaggcttagaatctgcaacttgatatttgtgttgaatattaggtgcatgcagtatatttggcctgagagccaaagtaaaagtaactcatagcatactgagactggatggaaggacctccgtcatttctccaggccaggtcagttttttttatgggtaagtgctgcctctgtagcccagagaagagaaaccacttgccccaggcacaggcttctagatatgggcttggaactagccctagaggctccacactgagtaacctttttgaccttgaggttttcagccagagaacacattcacaattctgaacagatgtcaaaagagacagagctgagatgactcttaccagcattggcttccgaagtctatgtctggctttgaactttgagtgtgagacttcattcccaaatgttgggttggagcagagctggctgaccatgaggtttcacctccatcattgcaggctggtgggactcttcatatgccaacagcaagtctttatgactgaaaataagacctcagagagccagtgggaaaggcagtgtgttgggcttgaattacaaggaaactgtgtgtgagtagcttcctggaagtccttaaaatatttgcttaaaagcataatagcttcctggaagtcctgaaaatatttgctttttcggggtatgcgtgtacgtgtgtgtgtgtgtgtgtgtgtgtgtgtgtgtgtgtgtgtaggtaggtgtgtccactagagatggcacagatctacttttggcctaggattcaaagctgctctgttaagttgaactatttcttttctttttttttttctttttttgaactctttattagtgtaagaatttgagttgtcttgcagaccaagtctagaacaggttttctttaaaaacaaaaacaggtgatcaaatgagcaaacttggcagccaaacctgggaggtgatatggtaacaattctgttattgctcagagtgttttgcaaatgccagtttgccttcataccagttctcaagctaaataagaaaatccacctcgttgcttctttataatcatgctttatatttgtatgaaaatgaaagttgtcagccaaggtttttttttttttttccagaaaatttagctccaagtggcttttggctattgacaaagaacagataacatttcaacagctaaaaattggtgccccagatggatagtcaagaaatagagcatctgtaaagttgagcagaaagaatctaaattcaggttcctcctacttactgtgagatcttcagtaagttgcttaacttctctgagcctcagtttctttatctgtggaaaaggatcatacctacctcatatctactggtgtgggtttgaattaaatgaaatactgtatttgtctgacttaatacatgtatcttctagtataacgaatattagtttttaaaaatctgctccaagcagttccaaaagaaaagtcctaaaattgttttggccaggtgatgtcatctttatttttatttttactgatttatttttttcagacagagtcttgctctgtggcccaggc

SEQ ID NO: 69971 - DNA, 3165 bp, Homo sapiens
cgaacatgtcttactctctagagcaagattccaggcctgaaatatggcttcccaattacctaaggatgaagcctcaaatctttggcctggcatttaaaagactccgtaatcttgttttacccaacctcacttcccattcttaggcctctcttctcaccatctcccaggtcactgccaagcctttgccaatgctgtaccccaggccttaatctttttcctgactctccttcaagatccagcttatccctgtgggctgagcatgcagtagatgctcaataaaattctcagcgagcccaaggccccctctcctgcactgcccttggcgtgttgaaatcaagtgggggccttgttttaatcatcattttcctagcttgtcgggcagcccagtccagggcctggcacaagggaccctcagcatccaataccagccaggattgggaggggctcagtgaccagccagttgggccaccccagctctttgccacaagagaaagttcagcctgggtttggactcagatcctggccccaccacttacaggctgcgtaaccctgagcaagtcactaacctcgcttttcctcaggttccacgttttaaatatggggagaccagctgtgcccactgtgggctgggtagtgaggattaaagaggaggatgcttgtacgggactagcactgggctggctcctaatgtgtcctgaatattacttgtcccgccctggccacccagtcccctcctctggtggaaggcacagcctgcccaaggctacgtctcaggttgggttcgattgtgtgtgtctgtgtagcggggctgtccccgagggtcggactcgatcctgcccggaccagtacaaggtgtggcccagcagaacgcatggacaggcagggctcggggcgggcgggacggctggggcggggctgggcggacccgcccctcggggcacgcggtctcccggcttctccgccagtatgtttgcttgcttttggggcccttctcaagccagatctctaacgtggatggagtggcgcgtttcagggtggggctatgacaatgcactgcatgtgcagccgccatcaccgcgccccctccaccggctccgcagtctcctgcccggctttcccttctccacctccatctctgcggcggtaaaatgcagcactcgcagagcgcctgcgcggctttcaggccgggcggcggcggcggcggtggctatttatagtaggtgacgtcaccttgaaatagaccgttagggccggcccgcccttcccccctcccactcccgccgctccccgccgcccggcctggccactctcactgcgcaggcgtcgtcccgtcctcccatcccccagcgcggccgcgtctcctccctcggcgttgtccgcggcgcgagccacagcgcgcggggcgagccagcgagagggcgcgagcggcggcgctgcctgcagcctgcagcctgcagcctccggccggccggcgagccagtgcgcgtgcgcggcggcggcctccgcagcgaccggggagcggactgaccggcgggagggctagcgagccagcggtgtgaggcgcgaggcgaggccgagccgcgagcgacatgggggaccgggagcagctgctgcagcgggcgcggctggccgagcaggcggagcgctacgacgacatggcctccgctatgaaggcggtgagcgcgccgggagcccgggcggctggccggggggggcctggcgttggggagggacggggatggccgcgggcgcgttcccctcccggccatgggcgacccggcgacccggctgggcgtggccgcccgcccgcccttagcccgcgcttcccgctcccgctgggcgccccgccacttcctgaggctgggcccagggtgggggatccgggagggtgcagttcgggatcgcgaaggcagccccggaaggggggcgggccggtcggggtcgccacatcttagttcggaacccggccgggggcagagggtgccctaggggacgcgaaggagccgcatttctcctagagcgtttcaccggacccgggggctccccctctcgtcttcctccgttccccaacttggaataaagaatcacctagtaagtggcgccctgtctcagctggttttctctgccacgacctgaagtctgcaattccgatctgttttgctctgctcgttcgaattgttctggttccatcttcccacgcctgggggtctggctttgtgtgcgaagacccctttcctgcagtctaggcgtggacgggggcgggagagtgggcggagggtgtggggccccactccacagccccaggtttgctgctgcgctgtctgcttggagattaaaatgaaacgtgacttctaggtgagacgaatctgtgtgtctttgcattcctgagaccctcataaatcgattctgcagcttctccggtggatgagtcgtgcccagccacaccctagcaaaataccgtgggtcacacaccacctgcatttctgagttccggttaccatctcactctctctccacgttattttacgttttctgtaaatgaatatttcctctccctgcgtcaaggtcacacagtggtagaacaactgcgaccaccaacctatgttcagtgtacaacctcctgagacctgggaggatccccttgaactccgccttagacctatacattcagaaattcgggcggtgagactcagacatctgcattgtaaccagctctcacaggcgatttttagctggcttaagtctgagaattactgcccatgattatagtaaatgtatcctttgctggccttttggagggagttccgaaaaaaaactgccaatacaaaggctccctaaaatcttaagtcatttggaaagctcatttgaaggcttttgatgttaatatcagatgaaatatgtagttggggccaatatttaggattgttcaggtaagaaaggtgcttgaagagttgcctttcctctggtgtccttgttacacacataactgggtgtgtttggaaaccagcaacaccgttgcccgtatgttgatttgttggtgatcttgacttgagcactattagcatgctgttgtggtgaggcaggttttcttccagaccgggggacggtctaggtctggaggctgaactttatgtaattcagggggtcctttaaaagaaaatctaa

SEQ ID NO: 69972 - DNA, 1189 bp, Homo sapiens
cagttaatctcagaacatcccgtgacgcaggtatccttcttgtccctgattttacagttcaggaaacggcctcagagaggtgaggagacgcccacagtcgcgtggcatggtgcacctgtgttctgaactgtcacttgcctctccctgtgagcctctctttactctgccttgtcttcttgtcctggggcaagaagttagggttcaagacccttcgggatgtgaggatgtttctgccactctggacattagttttctcccctaagtggctctatctctcccggcctgagtttggaagggagacaccattctggtacgacttttcttaggcctgtgctgccatctatggggctcgaaggtgctcgccatgctccagaccggccacctggcagtcaggtgagcttgcaagtgtgaagagcagcgggatgcgggggagggagcaagcccagtaacaaataaagcaaatatcatcggcccttgtcctcagctgctcgctcaggccccccagaatcctgtagcatttctggggattaagagggtggtggggttttcacctctatcacgtctactgccagcctggcgcccaaaggttcggccgtcatccgccccagcgggtccctggaaccgccgggatgcccaggctgccagggggtctaatggggaactgggagtttctttcaggtcacaggataggtctgcagtgcgactcaggctcccgcggggacctgcccactcgaacgggggaggaggaagaggctccgggggagagccaaggaggcggggaagaggagcggcgtcccgggaaaggggatgctggagctcctgccgacgctccacctgtagccccgcccttgactccgcccacttccccagcccctcccttccaggcgcagcctcgaggtggcgctgtggagccgcgcagggtctagggcgactctctgagggagccgcggccgccaggctccgtgggttttggttcaggcgccggttagtgtcggggtaggccacgcagtgagttggcttgaggcaggaggcaggcggaaaccgaggctgagaggctggctgtcgctgccacccctcagcaaccccagtgcagctggtcatcctgtcagccgatcagtcagtcgcgtccccagcccggctcacacgcctcctccatcagtccctcagtcagtccctgcgtttcctgtct

SEQ ID NO: 69973 - DNA, 1684 bp, Homo sapiens
taggagcctggggttctggcctgggctgtgtgaccctgggcctgtctctgctgctctctgggcttttacagcagtgaagagcttgggttctatgatctctaaggcttgagacttgagtggaagggtttctaacagaaatcctggggccatgatgttcggggagcaagagctaagctgtctggtgcaatagccactaaccacgtgttgctgttgggcacttgacatgtggcttgtctgatttcaggtgtgcccaaggatgttgtagaactctgtctagccacagtgtggggatggggagctcccgccgacagactctgttgctttctggcttggtaagtgggaataccgaagtccctggctgtgtgttcagcccagtggggttgggataggtactggggaaggtgggagctgggtcagaaaccctccctcagcccaacctgggtggactcctgggacccttggtgggaggaggggtctgatgaccctgggggagggagggaggggaattggcaagactcagatgtatactctggggacgacgatcctctctctttctgccccagtcccgctcctttctttgaagctggggtccccagctcacatcatgcccaggcagcctcagtgttccagtgaggcgggagctacagctcctggaaattagaggtgacctgggcgaggcaagttttttgtagggacctggtgggatactcccaggggattgttctcctgggcaggcctgggaagtcccaggaagagttggttattcattcacatccagtgtttattggacatccaccacatgccaggctttgtgccaggcagtgagtgacaggagtgaactgtacagacattgaccctgtttatggagtgcagtgtctagaagtggtgataagggcaatgggagaagacaaaaatgaaagtacacgaattagttaaagtaaaaattctgataccaggcacggcggctcatgtctgtaatcccagcactttgggaggccgaggccagcggatcaccggaggttgggagttggagaccagcctgaccaacatggagaaaccccatctctactaaaaatacaaaattagctgggcgtggtggcacatgcctctaatcccagctacttgggaggctgaggcaggagaatcgcttgaacctgggaggcagaggttgtggtgaacggggttgcaccactgcactccagcctgggcaacaagagtgaaactctgtctcaaaaaaaaaaaaaaagttaaaattgtggtatgtgctgtgagggtagcaaggcgggtgctaagatagagaacaaagcaggccattctgggaggattctctgagcaggtgacacttagcctaagacctgaaagaggaggagccatgggatggaaagagtgttccagacagagggaatagcattcatccactcactcactcatgcatgtgttactctgtgttggacgctgttctatttgctcccaaaacagcgatgaacaatacaggagaaatgctttctgtcatggagcttatgttgtactggaagaagacagaaggcaaataaccaattagacaaataatatcaggaaatgatgaatgctctggagaacataaaaagatgatgggctagcaaatgactaaggatgaagggactattgcagataaggtggagagggaaggccactctggagacct

SEQ ID NO: 69974 - DNA, 602 bp, Homo sapiens
agaattggtgggcggatggacagatacatggttacatggatggatgataaatgaatggatgggtaggtagacggatggatggatcgatgggtagatgaataatagatggatagataaatgaaagcactccgaactgagaattaggagagctgtttcctgtcctggatgtgatacttttcacatgtatgacacaccaggcatcagagatactgtgaggtaacagtgatcccattgtaacaatggcagtagtagtgagttaagaggagtttcaaaatatttataaagatgagtaactctgtgataattcatgatcacagttggcatgtgtcagtaaaaggattgtgtactagaacttaaggtattgctgactaaggagaatggggtttccctgtgtgataaccctgggaaagaagagagtgactcatgttgggtaaaaccacattgagtaccaaatatagaacaactggaacattagtcaaaagaacataaacagtatcaatgaaaattcaggagcttgcaccacagaggatactggcagtgaatgagtacaaatgccaaagaagcttgtataaatgaagagtgcagagagaggagatcttgag

SEQ ID NO: 69975 - DNA, 864 bp, Homo sapiens
ccttgctctctgtagaaaatattccagaaagcagaaaggaggtcccttacttttcaatgttgttttgaggatcaaaataacgcatgtgcctaaatgtccttggtaaactgtaaaactctctgaacatgaagaaaagaaaacaaacaaacaaacaaacaaaaaaaaacaaccctagtgggtttgtttggcagctaggaaggaccaaagactaatgtcagagcacccagactagagtggccttgctcagctggagtcagctacataagcttagctaaggtattcccagcctggcctttggcatgccaaggcagaattcatctctgaagttagaatgactcatgcgaggaagaatttgtcctaggtttcttcaattcaccagggaggtttccttagaatcctttatctgtactgttagaaggaaatagaatatcataaaaacaagacttttattagcccaacacttttcagaagtctttatagaggtcatttatagcattatcttataacttatgtgttgcctctttgtgactaatgacagcaaggcacatattaatgagggtatcacagtctacgatggcatgttgtcataaagcattaaaaattaactactctggaaaatcaaccaagggcagtttaaaggcagtgtcagctttgtaatcttttcctatcttatttacacttattagctaatccaccaaatcaaacgtgtgtgcatttaacagaatttcactgcaatcagtgaatggggccccttgaatttaagtaactttatgtgactgtgtagaggcatgagaggagagggaccagcattataaatattcattacaatttcaaatggcccagtgtgcagagtcaggaagaagt

SEQ ID NO: 69976 - DNA, 569 bp, Homo sapiens
ccttgtcagagcagtgcatggcaggccccagcagaggatcaatgcagtggctgagcaccgggagggaactggcgcttggagtccgtatatctggaacatggtaggactggtcttgggaacttgcccactccatttgagtggaagcatggcctgatcacccacagagtgcctttatcggcactttggttttggttttgattttgacttggtttgaattccttggcaaacgggcgtgcctttgtcggcactttggttttggttttgattttgacttggtttgaattacttgacaaatgggcgtgcctttatcggcactttggttttggtttcgattttgacttgaattgcttgacaggacctgtcttgggaacttgtccactccatttgagtggaagcatggcctgatcacccacagcgtgcctttatcagcactttggttttggttttggttttggttttgacttggtttaaattgcttgacgaacgggcgtgtcctttatctgcactttggttttggttttgattctgatttggtgtgaattccttgaacccattaacccacgggtggc

SEQ ID NO: 69977 - DNA, 2453 bp, Homo sapiens
aactgcctagcaaaatgagacttgcccctagatagaatgagcagcagtgtgtgcatcaaaggctgagtcagaacacctgccagacaatgacagtctgtgttattagatcctacagataatcatgtcatggtgttttctttttcttttctttttttttttttttgagactcactctgtcacctaggctggagtgcagtttagaatgatcacgggtcactgcagccaagatctcccaggctcaagcgatccccctgcctcagcctcctgagtagctgtggtgcacaccaccccgcctggctaattaaattttttttgtagagacagggtcccactatattgcccaggcaggtctccaaagtcctaggcacaaaggatcttcccgccttggcctcccaaagcgttgggattacaggccatgaaccactgcgctctccctatgttagattttctattccttccttcagggtaacggtttccacacaaagaaagtggccaaacagcaaacagaacacagatttatccccgtgcgctttttcttccctcagtgtaagtgacttgccaacaagggaaactcagtaagctttgattctgaataaaagaatggagtgactattgggagctgtttaccaagacgtgagacgagacggtaaacctttgaagcatttacttggcaccttcagggatttcaaaaactatttaaaaatacgttgcaaaacttcataaacgttttcttttttcacattaataaaaatatgagcacagatggtgatgaaggccgagagatacagagcccaggctttcaaactatctgatgatcctgagccctcaagtctccatctgggacgtcaaagaagtaaaccggacatcaagtcctggctgagcttcttcctaggtgggtagaggaagctatgtcaccgacagatcctcgaggtccttctgtgaagtgaatattaaaatcaaacaggccctgccctgcgctactgcaagaaatgacatcgctttattaaaaaccaacatgcgatactgaatgctgaaaacctggtttagtgaacaaaggtttgtaaacgttatttaaataaccagcatgactcagaggaggtgaattccagtcccagcaaatgaacctggggctggctgttccaccctggaaaagatcactgaagtttctgtgaacgtaaaacagctcacgatacgtttatgagactgatctgtgaaaacgctttggaaaccccaatttcgtatttatttagattcccatatccaccgcacttagcttgtcctcgtggttcggggacctctcctggcgggaggtggtgccggaacaggttgggcggccccagaaccgtgaggggagaaggacgggatgagggaaactctgcaaggggccggggcggacccagtggtcaggggaggtccagagggcgcagtggacgccggccgggccggggacggagcacggaaggccccgccatttgctctcctgccttacctgcatgttgggcacgaagcccttcttgatcctccagcagtttttattgatcttctccaagaactgcagctcatcattatagctgcgactcatggtggcgaaaactgtagcaaaaactcccggctccgctttgaagagccgctgccgcgtagtccggcttctcagagcaccgccttccaagaaccaaagcgcaggcgcgaccagcgccgcagcagatgagcaacggcaagcgccgaggctcaaaattcttcaggccaatgtctttcctctggttaagttgtactgtcctgtagtgtataactttaggatctttattagtcgatttcctctaaactacagctaagcgaaatccagaagtttaaagtataatctagttatcttttgttttggaaatgcttttcagcagcttatgaaaacaccttgagtctgggtcaggttcggtgcattggcttggagtttacaccctcagctgggaggggaaaaagataacgccagcagctgagaaagaaaaacctgtttgagtaaataccatagctgaacatttatgtttcagaatgaatctggatatacaccaaataacttttttggtcagaaaggagcatcccaaagaatgaagcatggcagcttatcatttattctgacaaacacttgtgggtgcatctattgtggccagacatatactacaaaatgatcaaatcacagcccttatggatcgccaaaactccccagtctagccgcatttgatgatcaagacctctttaatcatgcttttatacgccgtgtctcttgttcatagtggtaagtgagctttaagtgatttcagtttccagttcggcctcatgtcaacaactgcaactttgggattagaaagacgcaagattcaatttctatctgtgccatttactgacttggtgtgattaacccctcttatctctgtttcgtcatctctaaaatgggatcataa

SEQ ID NO: 69978 - DNA, 680 bp, Homo sapiens
ttactgggactcagatctcctgatgcccatcccagagctctctttttcgtatcttgcttttcctcttagctttctatggctcacttttgcccaggtctagagccctacttctgcatcagccttctaacaaatctccctgtttccactattgaccctttccaatccatcttctacaccatccccaggggaagctacgttacaggcatgtctgatagagatactctcctgatcaaaattcttgtattcctaggattgagtacagaggtacttaatgttcacttattcattgattgggtcatccagcaaatatttattatgtgtcagcactgggacaggtgctagagatagcagccttgtgagcaaaactagacacaaccactgttctcatgtagcttaccacctagtggggtggcaatcattaatcaaatcatcccactaattaaggtttaattacaattgagataaatgctcttaaggaaagaaacaatttcgtggagtcaaaatacaaagaggaacttgatttcatttggtagatgtaggaaggtttccaggggagggctgcttgagctgaaatatgaaggatgaataagattcaaaaggcagaatggggaacggagtggggagggttccaggcaggggttgcaaaagccccacggagggaactgagagctgggagagca

SEQ ID NO: 69979 - DNA, 350 bp, Homo sapiens
ctgcattttcattttgcagtgggccctgcaaattatgtagccagccctgctcagacccagctaaggcatcagagcaccagaagtctgcccagcggagaatttccaggagactgctgggcaacagacaacaagccagaggtcctaatttcagggttcatgttcatgaggtcaaagaactctgtggactgtaggaagccaagagaatgaattcacacatttccgggatgatgtaaatttatcggcttaaaacagttttttctattactcccataaataaacataacagccattgaacgtgctgttgcttactagtattatagaaacattagagataaggctcagtttgattt

SEQ ID NO: 69980 - DNA, 3151 bp, Homo sapiens
aaaaataaaaatggccttgctaaaaaaattaaatttatattcaagtgctatttctttacaacatcaaaaaacaaacatttctaacaatcccattcctcaggtctgtatttatgtctatcataaagcagagactttttacactctactgaaagagctgattcactcaactgtaaactttgcatgggcagaaacatgtctttttggtctcttgagtctccagcatgtggggtatctgtcacaaagtaggcaatcaatacatatttatttgcagaatcaagggcaggatgtggacaagtgctgccacctattgggagaaactttatttgactctaaggatttggactatggttatcacacaaggacgaaacttgatactctctctcatctaagttatcattagttagaccctctatggtagccagcctccaggatggcccgcagcgatccctgtctgttggcattcatacctttggctggatcctctcacacatagggttggtttgtaaatatgacaaaagccgtatgtgacctctggagctaggtcataaaagacattgtggcttataccttggtctctctgggatcacctgctctgaaggaagccagctgccatgtcatggggacactcaaacagccctatggggaggttcacgtggtgaaaacaggtctctggccaacagtcatgactgtgccatcctggaggccgatcctccagccctagtcaataactgctgccctggcctacagtttgtaatctcatgggagacctggagacagaaccacccagccacgcatccccaaatccctttacctctaaaacctgtgggacaacaaatgtttattgcgttaaactttggggtgattgttatgcagccacagagttctaataaactgtcggacatagattactggctacaaatagttctactttttttttgagacagggtctcgttctgtggaaccaggctgaggtgcagtggtgcgatcacagctcattgaggcctcgacctccgggctcaatcgaccctcccgcctcagccacccaactagctgggactacaggcaggcgccaccacacctaattttttgtattttttgtagagatgggggggggggtttcaccatgttgcccaggctggtctcgaactcctgggctcaaacgatccacccgcctcggcctcccaaagtgctgggattacaggcgtgagccaccgcgcccggccaacctaaggattaacctaaggcttctcagagcagatgccgctggaactgagggccacggaagaaagggggtgacacttggtcctggggagtggcgactgtattgtctgtctgcagcatccctatcagcgctaccgttgttccacgcacacagggagtaagtactgggagtcccagccaccgccgcggaaaatctgggatgccagcgagcggccgcatctcggcgcctgcgcactgtgcccgcgctctcaggcagcgccgttgcgcgcggagtcatcgatcggccgaccccgagaggcccggttcctttaggccgcctgcccgcctccagctctcggggtcggctccaggaggcgccctcaggagaggggcgggcgctctattccagagaccgagtggcagggcggccactgtggcggggctctttccccgtttcgcctcagctacccctcagctccggtagtcgccagtccggggtcgtcgccgtttggggcgggagctgctcggccccgccgccgtccccgtcgccgcttccgggtccaggcccctcgggccgcctgccgccgtcatgaggctgcgggtgcggcttctgaagcggacctggccgctggaggtgcccgagacggagccgacgctggggcatttgcgctcgcacctgaggcagtccctgctgtgcacctgggggtacaggtacgctggggccggggctgggcggcccgcggggagtggggagtgcttggggtgggtgcagggcgggttggcgtcatctgtgggctgcaggcgcgggcgtggccgggcgataggccaagtgcggggacgccgggggggccttcacgggaggcccgggctcttccgggcgtcgcggagccggagggtgcaggcgacgggaagcgcgggtggtcggctggggtccggctcctggagaacatggcccggcctcccgggggctctggtcccctcctcggtgagtcatggcttctggttttgcagtaaacggaaccagggagaggagggaacgcacaatttccacaactggttagatttcaagttggaaatgatgagcttggcttgggttaaacctttctggactgtgaggggtccgagttaatttcttcagctgttggagtatttcaatgaaaaagtttggaaattgctagaagttaaaaatctgccctcaatccgaggccaccggtagcttgtatcgctgctgtgaagcggcaacaattttagattctgttgtgttcatgcgccgagcaccgcggtgagcgcttggacttcgccgccgaaaagttttagaaaggacagcgtgtaggcgtgtttcagaccatttcattttcttgggtgaaatgttgcttttttgctaaaactgaggcaaacgttgatcttgagagcttgcagtttgggggcagtaaagttgagaaaggatcatattctgttattggtttgtgggactgcaggtgaagctgctttgtttccctaaaagatactttttggggacaataatttgggagtaaagcggcaaggtaagagtggtcctcttcaaatactgagctagtgaatttgaaacttgagtgtgctaaggaaaaatgaaaaagatgttccctggggatttttaggtgaattcttcaaaacaaaagcaaaccttcctacgttttcaccttatttttagggaattgggtaaaatgaggccgttattctgaacttctcgccctttcattttcctggttaagacattattagattgaaagtaagcctgttttcttcctgattaaaaaaaaaaccctaaataagatactgacataactccttttaaacattatagtaagtgacatgcctactgttatttcttgttgttaaacctgtgtgttttacatactggcatcgttaccagtaggttacgagtagaagattgaataaatcttcaaactta

SEQ ID NO: 69981 - DNA, 659 bp, Homo sapiens
agggaaatgatatcatggctgaaggcaggggcctcaggaacgcactggaatgggccataactcagagggggcagggaggaggtgattttatcaccccgaggccatctgagagcagtggcaggtctggcttgcctcacaggaggaagaggttgattagtggaatagggcagttactcctcaagaatgagctccatccctttcctgggaacacttccttctagggcaactgcctgcacctcctccagtttcacaagcaatgacagggctcagtagttgcaacagagacgatatagcccgtcaagcctaaaattaccacctggccctctacagaaaaagtttgctgacccttggtctaggcaatccaggtagtgctaaagcaaccacaggcaatccataaatgggcgtgcatggctgtgatcaacagaactgtatttagagacaggtggcagctggattcggcctgtggttgtggtttgccaaccctagcttaaagcacaagctacccacacagaagcctgcggatggagggactttccagctgtccagggctaacccttgcagtcctcagatatggagccctgcacacagtcagtgccccataaatgcttggcaaccaggcaacgattggccctctggggtctcatcatttcaagtggaac

SEQ ID NO: 69982 - DNA, 1821 bp, Homo sapiens
gctgttctctgcccccagaaagttcttctccattgttctgtgcctggctggcttgttgtcacttttcatatgttttgtgtaagtgtcaccaggtcagaagttttttctctgatagttctactgtgtttttctctcttttaacaatctcttcttctcaccaagaagtaccaagttgagtttgtaactgtgtatttatttgcttgcttttgcattgtctgcctattccactagactatgacttctctacccagggcttagcacagcacctagcacatagtaggtgcttaataaatagctgttgaatgaaaaaaagaaagaaggattagattggcccctctccttcctggagcaagtgagggaatgaggagttaggaggaaaattaggagaaaggcaattcctccttcctctttacaatgttactgaagctcagaaaccctgtaggatatagctgagaaggctttgtgaaggattaaagacatgaagacagtgtatgtccactcagtagagcctcttggcaatcttgggagggagatgttgttcctcccatttcagggatgaggctcagagatgcgaagaacttgcctgaaagcacccagctagtaagtggaggaatgaggatatgaatctggtcctggagaattcagaaccccatgatctgtccatgatcttgccctggtttgaatgcagaggatggaggcaacttttcccttttcctatcttttctctttcctatcttttcccttccccacttcccctcatctgggtcttctgcaaactccagtgacagatgggcttgagctggcaaagtgcaggttttgagagtgccatggggcaggtgcctagtctcttcctggaaggacccgggagggcaagctgtaccagccaaactctattgccaaggtatcccccactggaatcatggccctgatgactcaacccaagggccccttagccaaggcagactgtgccaggggaccctaacatggccggggctctgggctgactcacagggcaggctgccaccacctgagtcacccgccccacctctgactggagagaagaggctggggaggctggggtggggcactggtctgggaccatgtgactcagcctgtgaataaataatgatgacagtgattgtaataacaaaaatgatggacagtgacagctacctctaacgagtgctttctatgtgcttggtgctattctatgcactatatacagtattcatttagtcttcataacaatcctatgaggtaagtactactattcccatttcatacatgaacaactgcggcccagcaaggttatgtcattggctgcaggactcacagctggaacagaaaagctgagatttcaactacgtccgtctgactctaaagcccagacattcattcagttaatatttattgagcccctactacaagccagacactgttgtagacaccaaggagacaatggcagggttgggtgggaagataaacaaatagatatatgacatattaggtggagatgagagatgagtgctactgttagagtagctagtcaggcagacatgaggagggccaagagggctcttccccatccaccagaaatgtcaggcgactttcaggtgatggtcaggcagtttttaattgtctcgttaaaataataattggttgcagctggcaccagagaaaggcagtctcctaatggatagaaaaaaccttggccgggcgcggtggctcacgcctgtaatcccagaactttgggaggccgagatgggcggatcacgaggtcagatcgagaccatcctggctaacacggtgaaaccccatctc

SEQ ID NO: 69983 - DNA, 823 bp, Homo sapiens
ctcaaattctcaaaagcctttgcccctcctccaacccttctgaagatcaggactcagagctcaaaggtgtccttgccccagccgcttgggtcacttgctgccaggggccagaaggggtggtgggaaggtgatgggaacaacagggtttgatggactgtttggggaactgtctaattatcctgcttatcagtgctggttccttttcttagctctttcccttaataaatgaaaactccttctgttgttattgagctcccgggtcactgattcttttgagtcatataaaccacatgtttatagagttacagtgtgaccgtgaaattgaatggaggggaagggaggcaccagagaagtgtcagccttgaaaggcaacactttctcttcccaggcttctgctcattgtgtagggcaaaggacagggctttccgctgtccagggccctggcctaggcggggaggggagctgaggtcactgggtacagcttgtgcgtccacagagcttacagcctggttggggagggagatggccaggctcagagttgaagatgacctagatcatgcgtcaacaaactatggcctgagggccaaagccagcgcaccacccgtttttgtacagcccatgggttaagaagagttttcaaaattttaaacagcagtctccccttatccatggtttcaccttctgtggtttcagttacttgcagtcaaccatggcccaaaaataggtgagtactatacagcaggacatattgagagggagagaccacattcacatgacttctgtgacagtagattgctataattgtctgattttattattattt

SEQ ID NO: 69984 - DNA, 1496 bp, Homo sapiens
tggaggcagatgtttgtattttagaaagctgcttcccctacccccaacacatggacagacacacaccccaaaatgtaacaaacccattgtctgcatcatctgtggtcttcctggaaaacaagcctgccatggccacctgtcggcagtgatgccaactgctccccggtacagctatttccaagattccagagatgtggctggtttcacttccaggaagcttgctggaagactgccctgtgccccacgcctcagtagggcagggggcctcccctggttttaggatcatgcttctcctgcctgctgatggtaagaatgggctgtgcctgagcgttttggctagagaagccctcagcagacatataggctgtgttccaaaaggcctggcagaactctctggagtcttacctcccctggcatggatgccagaatcagtgggaagaacgtgtgcgtgtgatatgcagccctgtgcaaatcatttctcctctttgatctctgcttatctcatctgtaaaatgagtatcattgaaacggtcctcacagggataacaaaaattacatcctgggtcctgtgcagaaatatagttctattaagcactaatcaggccacactttggcccacttccttgtaactgagagtcaggtagcactagatactgaccatctgcatcctcattgttcctatacctaggatttctaaccttagaatcataggtttttgtttacgaattgatttatatccccattgttcctatagctacgatcagtgaccatggactcataaggcttttgtttaagaattgcctaagatgttcttcagatcctgaattccagcaggaaagctaatgccaaccagtttgaaaacaaccacagaggaatcgaatcagcacgagaatgcagtttcttcatttccctgtcccatgactttactctgcactctttgaccaatcaataatcctggaccttggcccacttcaaaccccttgaaatctctagctccaactccctggaggggtggatttgaggtttcctcctgtttccttgtttggctgccgtatgattattaaactctttctttgctgcaatccctgttgccttggtttattgacttactgtgcatcgggcaaacaaacctattatgatgacatcatgacgcaatatccacctcaaaggactgctgggagcctcaaaaatttacaaatttgtgaattgtatgtgactgtctgatgccggggagcagcaaggagcttttggtgattggagtgcggtaaattataatgttccccaccccaccgggtgatgtgtgccccacttctgtctgagggtctcttaaggggaagaattctctggcctttgttagatgcagtgtcaggatggctcaacagacatgaccaggaaaacagagaaaagaaaaaaggaaatcttattgcttttcaatgtctgtcagttaaaaaaaattgatattctttgtttttcatggaggggtcctctgcatcagt

SEQ ID NO: 69985 - DNA, 969 bp, Homo sapiens
gagtagcccctcaataaatgttcgggagccaaactgagctcgtgtgaaattgtaggaaactgatgcctgagtggggcgaggagggttcaggtctccccttaggaaaaagcaatttcctcccagcacgagagcttccaaaaaggcagtggtttccaagctgaaagtggatgggaacaaacaaaccgggcacaaggtttgtctatgaatgtgtcagccctcgaaacttatgtctccacatctctcttggctccttgatgaggtgcttcctccatttcagatggatggtgtttctttcccccttctaaaaaaagcttctagatgcttttaaattaggcaaatgagcaagggcaatgttcattttcccccctttcattctgaaaatgtgtggcgtgccagaaggcctttggacggaatgttcagaggctgcataatagaacaagagaggctgccaagctcctaaatcactaaccagacaatctcaggccctgggacttagagacccctgggacaacatcatgagctgagtccgcaacaagtgaaaagatggcccacagcccaaggtctcagcaggaaaggaagcccctaccttgaacagctgaaagttcaaagtgggccacagctccttaagctcagctctctaggagttgcctggtgatggaggaccttgggcccccttctgtaaaacctcagggagtagatccaatgccaacactttctttgtgaagctcagtttacccactggtaaaatgggtctaagctgaaggactgcaaaataatagagaggactctaaatgcaggtgtttctacctgtgacctcctctctatagaatctgtgaggtccagagccttaatattgagcatttggttgcagggccagcagcatcagcatcacctgggctcttgttagaaatgcagactctcaggccccaccccagaccggctgctcagattctgcattttcacagcatg

SEQ ID NO: 69986 - DNA, 955 bp, Homo sapiens
taaataccagcctttgatcccaaaatgtacataggagttccacccctgttctgaaataccaggttttgaattgggtcagataatcaacagtggaggtcactgggtcagactgtgctagagtgatgtggaggaataaatgtgaacattcattctggagggtctaggacaaacccatttgaaatactgtgttacactatgagcccttaaatctcaaattttggtttggaaaatagaggctcccatagcatcagacacagtcccaactcatgttaggttgattgcactgatagtatcaattactgactttcctgtgtccatgacctttacaacatgactatgcagttccttccaccaagagaaggcatctgttttcccaccctttgaatctgggctggccttgagactttctttggccaaggcagtgcagcagaagtgtcccagttctgcctaggtccccagagacattgcatgtttcagctctctctgggaccccgtaatcattttgtgaactagcctgggttagttggctagaagatgagagaatacgtggaagagtgcctactcatctcagatgagaacagccaggactggcttacagccagctgacctccaaacacaggagagaacccagccaagatcagagctaccgacatgaccacaactgaccaccaatggatgaataagaccagctgagactagaagtgccacttagctgactcatagatttgtgagcaataatacattcttattattttaagccattgagtttttgggtggtttgttacacaccaatagctaaccgatacataaaccttaaagatcttaaatctggttggaaaaaatttcaaacttctaagattgcctctagcttgaaaatgccatggttctttacaaaagaaaggtttagaatatggtgtcaaaagtgaatgccttcaggggctttgagtgaagagag

SEQ ID NO: 69987 - DNA, 923 bp, Homo sapiens
tatgagccactatgcctggccaagtttttgaaaatatgtattgtgcacttccagcaatcaatggcggtcttcccataaccccaacctgcctgccctgcctggcctgcaggcctagctggcaaacctggatatgctcctggatccctggaatccagacgtgccacttcccactccattcctctccttgccattcattcagccaatatttattgatttctttaactctgtatgagatgttgtggatacagtggtgaacaaaactccatcttcataggacttattcaaattgaggaaactgatggcatttttctaataataagaggggacttgggtccagggtggggtggctgaactctgtcggaaaaacgcttctctgtgagtgccgaggtgtcccctcccaccataaaagagggttctgacgggaatcgaggacaccaatgcccatttgtttcagattcgacattctccatcttgacagggtccccaaggttctcctgagtccaaggacaccgctgcctcccagctcataacaaacgatgctcacaagcatgccagccctctccttctatgaggcaatcctcggaggcccttgccaagatcaactgtttggacttctgccttgaaaactgatcctcttccgagtccggttattgcttttctgaaacatggggacagtgacatcatcgctccctccctggcttggggatttggtggtcagcatgaagtcagggtttggaacggtgcctgttctctgccaatgcccagggaggcctgggttgggggctctggagtgaattgggcttgctggggaagtccccagaggctgggtggggggtcactttcaaacctgttgccagcatctgggtctgccttgcagtccccaggatgagcagcattctgaggagggctgaactgatggtcgg

SEQ ID NO: 69988 - DNA, 637 bp, Homo sapiens
aggcaagctgggcaggtttatgagctcggagcctgagaggtgaaaggtgaagctcctccccttctgctctgaccctgtcgtgtgtgctccccaaatatttggtgaaatccatcccactcagaaatcgctttggatttgagcgtgggatctgggtcagtgatagcaacagagcagccctcgaggtaggaacagaggcttccccatcctctaggaatttgcataaatatactaggagattgtgaaatgaatgaaagtccaagaaaatcacatctagatctgtgaggcaaggagagaggcccagatgccatctgggtaacatatgggaaagtgtttgcaaactttaaccactacgtaatgcaaagaatcatttgctatccttgttatatacaaaaatcttcatcaaaatgtttgcattgagcagttgaacctaatgatgaaagaggcttgcaagagcaggctggccgggtcagccctgggacagccagcccaggctttctcaggcaggcggcacggtgtggacgagaggttggtgggcagggattggcttcctgggtccaaacacctcctttttctcttactatctttcttgtctttcacaggtttatttaaacgctttataaacttttttctttgtatt

SEQ ID NO: 69989 - DNA, 1521 bp, Homo sapiens
tcaagaccagcctggccaacatgaagaaaccacgtctctactaaaaatacaaaaaattagctgggcacctgtaatcccagctacttggaggctgaggcaggagaatcgcttgaacccaggaggtggaggttgtagtgagccgagatctcaccactgtactccagcctgggcaagcgagactctgcctcaaaaaaaaaaaaaaaaaaaaaaaaaaaaagcgacaagactgactgatgatgggagaaaggaactattcagggagggagatgggagacagagtgcagtttcacaaacatatactgaatacccactgagtgccagaaactgtgctaggcaggacatacaaaatggaatttgaccccattgctaccctttggggagcctgaagtttagcagggagacgagacatataagcagatagtcaaccgtacattcagggttggaggctggcagtggaggggaggggtatgaggtggggaagaggaagagggaggtgctctccaccagtccctgaaggcacactgaggataaagatcctccttctaggtggcaggtggcagctgtcctgccacgtgagtgtcaggggccctgggaatgccttttcagcatgccctggctccacgcaaccctcccaaataaacgccttccagcccagacaagcaggaagtgtgctgggctggcggatggactgacgctcgcacatgcaggcacatgcacaggaaactgaactgctgggcaggttattttcgtttttccctttccaccaccactggagcaatcagtgacattcctttccctcctaaacacacaggtttgtgtaccagagcctggcaggaagtgaagaaatcccctttggaagagcagcagcggcctctatcccgtggcctcctccctcattcctggggtggctgcctggggcctcccagtgctgtggccttggtggcttttctcctctttttctgactgttccgggaaaggggagggatgggggagaacctggttcagacctctttttggaatcacagtgcctttggccctccactgcctagctctctccagcctcagctcagttcttagaatgatgtcgtagcaggaagtggttggggaaagggtggtgagaggtggcagacacaggaggagagaagaggttcccaggtccgagagaaaacaccagaggggagaatccagagaggactcagaggtgaaactgtgccttttgacagtgacattccttccttcaaaacacttttcctaagaaaattaagaaggcaaggacaagggacccagaatcctccctaaagccagacaataattaaatgagagctaagggccgaggagggcagatcacctgaggtcgggagttcgagaccagcctgaccaacatggagaaaccccgtctctactacaaatacaaaattagccgggcatggtggcgcatgcctgtaatcccagctacttgggaggctgaggcaggagaatcacttgaacccgggaggcagaggtggcggtgagcgaagatcg

SEQ ID NO: 69990 - DNA, 1275 bp, Homo sapiens
atatctttgaatatgtttctgtcttattgctctgttcctttctttaggaatgtccagcatgcatattcatatttcctaagtatttttcattattttatttcattgtttttattatttctccttttctttcattaaaaaactcttactatgttactgactctattatcaactgaataaatcccacattctgctgatgctaattttctcctctgtaatggctttcattatcattttcattttttcatcccatgttagatcttgtctgcttgtttgtagttttactttggaaacgtcttgttgtgttctgttattttctcagggatggagtcaagctggggctaccagcagattccatttgagtttggtgtctcagaatttatcagatatgctcttccctggggacacatttcccccaggttttgaagcattcccatgagtatgaggtcagtgtgggtcaccagaaagccccacagattcatgggtcctctgactggccatttaatgtttatgcatctcttctgctgacaagctgcaaggctgactgctgctccctttctcttccacctcacctctaagacatttaagcaatggaggtcagggtttgtactactggctatccacatagtgccttcctatccacagccctgtctcccttgccctttgccttatagaaatgagtcactacagggaactttactcttctatgactcacctacctctcttttcctttttttttctccaataaatgattatttattcagcctttagggatcttttatcttactttcaagaaaatctggtaacatataggactcctctttttgtcttcctctgatgaaacccaaacttcactgaatgtggcagatatgggttttagcctgttttctttagagtaatattagcttctgtaacaactgaacacacctccaaattgcaatggtttaacatgttatatattcatttctcactagtgtaagggtccagtgctgatgttcctggtcagcaggtagatgccatatggtgagtcagaggactgggctccttctcttttgaggggtcttggagtaccctgaattctactaggggaagggcaaagagagagagtagagaaggtgttcccatctcttgaccatgctggcccagaagtgacatagatcacatctgttcacattccagctttgagaactcatcacatggctcaactaaatgcaaaggagtggctgagaaatgtggtccctgcctgggcaattgttccttacccactcctctctatta

SEQ ID NO: 69991 - DNA, 675 bp, Homo sapiens
tggagctgcgggttttcaaaccatgacaccaggttagagcaacaaaggaatgaaggtgtgtgtgcaggcagggagaaaaagaggaccaggagccctgagcccagcccccagcccccagcccccagccggtgttgaagctgaagggtaacccagtgacgccaggagggacgctggtgagtgtgtcatcctggagccaaagtggagggggtgtttcaaggaggagcaatggaccagctgtaggtcaaattaggtaagatggagcagtgacctttagaggtcactgaccttagcaggcgcaattgcagtgcagtggtaaatggcagcagggccactcagaagtggcctctgctctggccctgagaagttaactcagaattccaggggaaaggcgaaagtgctttttaaagaagaggggtggggtagggaaacaaggcatgcccctccaatgttcccctgggatctggggagtccaggtgcgggtggtcatgggagagatcgggggacagctctcttgggcaaggtgtgtctctgactcagccattgtcagtcgcgtacaggcctctgtgggtgcccggcagaactggcctataggcagtttctggtggtgaccttggcagagggtgttgacagcagtgggatatcaccaccttcagtcagagttgcagaatcagaaca

SEQ ID NO: 69992 - DNA, 1118 bp, Homo sapiens
tctcagcctctcaagtagctgggattacaggcacctgcaaccacgcctggctactttttgtatttttagtagagacggggtttcaccatgtttgccaggctggtctcaaactcctgacctcaggtgatctgcccgccttggcctcccaaagtgctcacattacagacatgagccactgcacctggcctctttcttttaaaaaaaaggactttgcactttggtcatcctcccagtactggactactgaacactgcccaagcaaccagaccatcctctcctgctgccgcagacctgatatgtgaagagttggtcctgagcaaggcaaacaaagttctgcagaatctcgccttgtcttagctcctccacccggctcccccttcccctcactctgatctgcactgtaaattccagcaagtcctcagacgttccctgagcataccatacagtcctacaccttgatgcctttgctccttcggcacttgctgaaagggaaggtgagcgtctccatgtaacattggccaaacccttgtccaaagtctccagattgagaaatcactttcctgtgcttttcctggtgggtggagccttgttcagggccagagaggcctccagaaattctccctatcttagtcactcttctctccatgggccccacagctggcccagagaaggaggtggaaactccctggataggaagggacttctaacctctgctccccctgcaaggacaatgtgagactcagcacaactccaagtccttccctcccaagtctggcactgggactgagggactagagagcagagcagaggcgcagaggctgggaactggtctggggaaggttggaggaaggaaactaacatcgaacatttactgagaactatggagttccagcactttttgcaaaggtcatcttgttaaatcccatcaccccaatgaggtaggactatgataattcccattttatctgggctaaaacgaaggctcagagaaatgaaattactggttcaagatggcatctccaggttcaaaacagtgaatgctcttgtcactttcacccgctgccttcagacccaccacactgactgttccagaggggaaagcaatcttgagagccctt

SEQ ID NO: 69993 - DNA, 1316 bp, Homo sapiens
gcattattattcccactttacaagagaggaaaccttggctctgagcagtgtaatgacttacccaggggcactcagctggctagttgcagagctgggaatcaaacccaagctgtgcttttctcccaaatgcccagtctccccaggggatgcatgaataggaaaaacaggaccttacgtactttgcaggttactaccgtgatgtccttgctagcgactcctccacgctttagtaccatcaagggtccaggttgggcaagtactcgaacctccattctgccctgggataacctgggcagaaaagccaaacacagcaggggagcaggaacaaagcgctcccttttatggtgaggcggtgcaaacctctgcatctgcctccaggccttgccaaggcccacagagaaatggcctgccctaaagattgcagtgagctgagattgcgccactgcactccagcctgggtgacagagtgagattctgtctcaaaaaaaaaaagagagagaaaaaaagagaaaaaaaacagaaatggcctgccctgactgagcccgaagccttctgccctgatctctgcttttctttgtgtacctgtctggttacaaaggaagcagctgccagctcactggtgtgggacgccatgtctggtctgtgctttgctgaactgtgctggaatttcacgggctgaagctggccctggggggtgccgggaggtgaatgagagaagtgtctcaggagtgttgttctgggggctaaaattacaggtgatcggacaactgctgtaggagatggagacagagcagcacctgagttgactctaaaaccagagggcctctgtgcagtgcgctgttggccgctctggtttccttttcgcatctctgcagcccttggtattttctacctgtgttatcagagaatctctggctgaggaccctggaaatttctgcccccatctccacccttggaagcctttccacaaagagctttgtaattcaccaggtgccttgcatatgggagggattacaccttgacctcaaatatttgctgttttcgtcactggctcagagcctgggcactgaaataacactgcatggttggaatcctggctccctgacttaccagctgcatgaccttggacaatctactgaacttcctgtgccttagtttctttatccttaaaatggaggtaataataatattaaccacaatgtaggcttgttattataaggattaaatgatttcatgtaggtaaggcacttagcagtacccagcgtaataagcacttaatgagagcaacttggtattattgcctgcctgcctgcctg

SEQ ID NO: 69994 - DNA, 1779 bp, Homo sapiens
acagaaccccgtttgctctgggagagcacagaaaacagtcttctatcatatatcatagccagctgcaaacagcagatggcttcccatatcccagagagtaagaaccagagagagagagaaagagagagagtttgggtctttctcctctgtgcctgctctctccagagaaactggaggggtagcagttagcattcccccgctggttccaccaagcacagtcaaggtctctaggacatggccacccctcacctgtggaagcggtcctgctggggtgggtgggtgttagttggttctggtttgggtcagagacacccagtggcccaggtgggcgtggggccagggcgcagacgagaaggggcacgagggctccgctccgaggacccagcggcaagcaccggtcccgggcgcgccccagcccacccactcgcgtgcccacggcggcattattccctataaggatctgaacgatccgggggcggccccgccccgttaccccttgcccccggccccgccccctttttggagggccgatgaggtaatgcggctctgccattggtctgagggggcgggccccaacagcccgaggcggggtccccgggggcccagcgctatatcactcggccgcccaggcagcggcgcagagcgggcagcaggcaggcggcgggcgctcagacggcttctcctcctcctcttgctcctccagctcctgctccttcgccgggaggccgcccgccgagtcctgcgccagcgccgaggcagcctcgctgcgccccatcccgtcccgccgggcactcggagggcagcgcgccggaggccaaggttgccccgcacggcccggcgggcgagcgagctcgggctgcagcagccccgccggcggcgcgcacggcaactttggagaggcgagcagcagccccggcagcggcggcagcagcggcaatgaccccttggctcgggctcatcgtgctcctgggcagctggagcctgggggactggggcgccgaggcgtgcacatgctcgcccagccacccccaggacgccttctgcaactccgacatcggtaagcgctcctggtgccccgcccgagccccacgctgcagccaggactgcagcgctgcttagggaggcagggcgagccccactcctttcctctgccccaggagaggggcagacggggttggggcggagtggagaaactcgatgtccttgggcgggggcgctggcatagctgagaggggaagatgccctgcagaggaaactcacagtggctgagggagcccctggccgcctttgctttcctaacttaggtcgtgaggttcctaccggtccttttgacatctggaaaatgtccccattcactactaacggaggaagggctagaagagaagggtggggaaagggttcccaaaacttggaatgctaactaaagtgctgggaaattgaatagttaaaaaaaaaaaaaaaagttgcccgccatgtgcacggaaagttgcaggagaaacttggagtactccgagtctgcatcatctcctgcgcctatgaaattcattcttttcactgagacccaacccagctgcaggcttcccaggcaagcgctaaccgagcttctgggactgccaagtttgggtggatttaagggggaaaatgaggagaaagctgtggcattgacccacgccctggaggcactgtgtttgagagtgttgatagccagcagaaggtgcgaggggtcactcaccacatagctgtgaaaattcacaggaaggctatttttttcccccttga

SEQ ID NO: 69995 - DNA, 710 bp, Homo sapiens
acagtagtatggcatcatgactctgcagatgctgtttgatgggacattttctctagattttctcaccttcatgctctacagtggtatggcatcatgactcggtgattatttctctctattaacggacccaccccccaccctggtcatatgcccagttttcttctcttggtaatggcccctcctcttgctccatccatctggttacagcagcagcaccatgtttgttcattgacatactgcccttttggtcacagttgatggggtaagcatctgactcggggtggaagaatgagatactcttccctgagagtttgaaactgatgagtgagtcatgcagtttctttctaggtggttgtatctttaatgcacaaaccatgttttctgtcatctgcactggcaaagcacagaaaaccagggtggagagagacagagagagggaggaatgtcacagtcaccaagagaggggcaggggcaagagatggggatgtttatgtgccagctacagacctacctttggattttgtgagttcatcttttgggttgcctatttgtttaaatgagctttcatggatttctgttgcttacaaccagagtcccatggaatacatccctcttaccagatgacatgctccctgggatttctcactataaccacctgtcttagtctcccaaggctgctgtaataggtggcttaaacagcataaattcat

SEQ ID NO: 69996 - DNA, 1096 bp, Homo sapiens
gcctcaggttcctcatctggagaatgggggaactcatagtacctgttcatcagagtcatgatgaggatgaaacacgctaatccatatgaaatgcttagcgtgtgcctgacacttagtaagcatgtgattagatactgcctatgatcattaattccttcagagcccaggctgtacagctgccatctgcctcaggcaccgccagtggaaactctctcaggtcaccctctaaaactccctgagatgagggggccaagactggaccaaaacgggtccagtttaggttgaattctattgtaaagtaaatagtgccttagaactactaaaatcctatgtgatactaaagatagacattgtagggcacataaactcgttctctgctatcagcctcccagctccttcctgagggactagaaaatgcgcccagactgtgtatgatccaaaggaagtcatttcaatgcctaagtcctgttgatatgtcagctcactcccctcctcaggagactctgcttagagtgggctgggagattccttagacaatctaatagattagtttccagtttagcataacagccagacagatttttgcagtgaagtcatccaagtcaattaaaaggcatttttccctgctgtgagttcagaagtccctttggttcattccagttttctgggatgtttcataataggttccaccctaggttaattaataacccttgattcccactgaaatgcaaaggctcaaatccactgtgtaagcacatccgggcagaggctgctggcagggctggggtgagcccagtgggggctcctctcatcagggagtgggccagaccccaaatggtacagacaacagcagagctggcagaaaatgtagagtagccacacaaaagctgaaggccacgctggagaagtggtgtaaccaggggcagtagcgcatggggagggagatcatcaacagatgaaggaatcacaaggctggggattaggcagattgggagcaagttgacatgtgcagtgtgaaacggcttagtccaagtggctggactaaggtggtgaacaagaggaggttggcaatggctcgctttcaagaaatgccagc

SEQ ID NO: 69997 - DNA, 522 bp, Homo sapiens
tttacagcaaggaccttgtctatgttatttactgtttgcctttgatgatgaggaggaggaggagtaggaagaggataaagaataatgatgctgatgataaatgggtaacatttactaagtgcccagtatgtgccaggtactgttcaagcacttttcatggactaactcgtttgatcctcacagcaccctatgaacacaggctgatgctattattgccccagttggacagatgaagaaattgaactggagggagtgtaagtattgctcaaccaaggtcacaaggttagtaaggggcggtgttaggattcaaacctggagtatggctccagaacctatgctcaaatgtgctctcctaaggctgagcacagtgtttggcagagaggaggtcctcgcggaacgaacaggagaaagctttgatctggagccaggagaccacaccttccactcctgattctgccactgcctccctacacagccctaaaaaaatctgtgtttctttccacataaaatgagggacctgga

SEQ ID NO: 69998 - DNA, 1460 bp, Homo sapiens
aaccttgtccttcctctcaactgaaagccaagattagtattggcttatttaagcatgaaaacatctgtgtgacacatttaaaggcctgttttaccccccagggaattgatgcaaagaaatcaacatcttttgcaattacctctgcccaaatggctacagctccccacacataagctggggctggcagtgaactgctgctcccagtgtaagttctgggaatgcaggctgctggctctgcggacctcagcctccattgggttggcagcctctctgttgaagttgggcatccgccaatgtctgagctccagccttcagtgagattggcttacagtgtaaggcacctgtctttggggaaataggattttctcctgttggtgtgaagtatcagtttctggccttaataaattcactgtacgtgaaggtacatcatcttctagtttatgcctattgtgtaaaaataattagcacctttcattctcagaagtgacccgatttagatgacaaattacatggtcaccagctacgcccataaaaatgcaagtgaaagcaaggtggctgggcatgagtcaggggccaagcaaaattttaaaaataaaaaggctttagggaattaaaaatggatttttaacattgaggaaccagtgctaccatcaggttttcacttggctcaagtagctggtaatgattaattcaaaacctgtatcggtatgtgtacatctcctaacagtggtcctctctagggaaggaggagaaattagtgagtgcctctgtatctgtgtatctgtctgtgtgtgcttgtgtgtacacaggggagagagaaagtcaatgatatgctgctggtaaatatttaacaactagctcttggggatggggacagaggaatcactgaacgtggaaactggaaatatgcccaaaaaggccttgtgagcatgtagaagctggcctggcacaccactgaacaaattggactttgacatgtactttcaaaatttttgttctgctttatacatatatgtcactttttatttataaatgctttgtatataggctatatacttgtatgctctgtctacatatatatttacatacatacataagcctagctagatctatgcaaaaattagtcctaatggtaattttcctaattcttgtataaatttccgtgtaacatccacttgagcatgtaacatcgtgagtgatctcacaaaccggattgctatagggtcccacatgactaccaggcccaaggatgggatgttccctttacaattgattaccaggatttaccctcctagcccacatctggtagaagacaacatctggctccagtgttgagaaagatgcggaatggaaaacttgaagatggtttgagttagagacagagtgggatctaacttcaggcaaaaggggaaaaaaaaggctaaagttcaaatgatgagaaaaatagaatgggggaacag

SEQ ID NO: 69999 - DNA, 475 bp, Homo sapiens
gcctgacatagagcctggcatgggggaggtccttgatggatgagcagagaagccgccccttccctgcccagccttgcgagccacttacgttttcactgttgacatcagcctcactggggcagccaaacagttcccgcctcagaagattgccgtcatactccaggaaggtcaggtagaggttgcgaaaaaactccacatgcttgttcttcacccggagcttcttgggggagttccagtgaatgacctggcagggagataaggaagtggtcaggtatggcaggggtggggtggggatccctcacacctgtaggaagccatggctcagcactgggctaagcattatttgagggtctgctcattcgctcattcaacattttggcagagtggttaagggtaggggctcgggggccaggtcacctgggatcaaaccctgcctctgctctaggtagtcctttaatctcacacaagtgactga

SEQ ID NO: 70000 - DNA, 538 bp, Homo sapiens
ctgtgtcacaaagtactaaaccaacatttcaaaaataatgaagcacattcaataatattgctatgtttaaacatatgaatacttatgtttttcataagagcaaaagggtttattattactaaattaacttaaaattactcaaacatataataaaatgaaacttttctgttttatagtgtattcatgtaccacagtaaaaatatgtttgcattggaataggtcagataagaagtattttagtactgtgacccatagtttaaattccaagctccttagtacacagcctgaactctctgcttatctccttgttatttctggacaccatgatcttttaggcccctgtgttcattcgtactatccctttttatgtagcaccttcatttctgacctggatacctctaagcaatattgcacagtattgttcacattatgtggaaattagcagttgaaacttctgtatcccctgtttgtaaggctctttcagggcaggaattatgatgaacttgtctctatatcctcaacttcactaagtgtcttc

SEQ ID NO: 70001 - DNA, 554 bp, Homo sapiens
ggaagttctaaccctctgatcacttggtctttccatcctgaggctctctaggggccctactctaagacacctcattagcataaactcaggtataacccaaaggggctcatatacacaataaaagctgttcttatcactcaggaaatttcaagggttttaggagctctgttccaggaaccagggacaaagactaaatagatttcttataataccaggctcacctttaaaccaggctccctgccactagggatcatcccttccaagggcaaaggtgacatccagttgctctttgcttatctttttggattcactctgtcattgtttctggcctttgctttctttacttgctttatgaaccgatcaattatgctttcaaagcatgtaaaatattttttaatccagcatttttacatattctttacacagttggttttatttcgccccctctccaaactttttaatccatgatattcttgacaatattcctgtctgtttcttctcttttccttatttctaacaagcacatgatatacagaaggaactgaataaatgcc

SEQ ID NO: 70002 - DNA, 1363 bp, Homo sapiens
cagacacgtctctgtagcactgctcggagcgggtgtggtctgacagctgcacattccagaagcaggggagctggtacacaaggaaggggttttgtttgatgacggcattgaaaatatcctgggggatgaaagccaaagacacagtcaagacagtcggatggtccagctgcccattttggctctcaaggcactgcatcccctgtgatagggcttctcttgaacctcctgctctgaacacaggctggctcgcactgtgaggcatctctcttgcctgttatctctaggaaccaagcaataatgtttggatagagacgggggaatgtcccaggctgactggaagctccagagtcctgctggtctcataaggccctatccagtgagctcacatgtgcagacatggggtgtcttccctaccctcactggcatatgaaaaacgaagtctccttcccctctggcctcctaggcaggagccctgtgttacccatcctgagcctcctggagaggaaactgcatgatgacaagtagccccactcattcagggactgagacaaattacagatcctccctttcagcagtgcttcctggggcctgcggtggactcagtgatggatgctccttggatttctgcagcccatggtgcccaggatacgcactccccgtttcaaaatccaaccctgacttgtctagggaggttttaccttttttgggctcttctccaagctgttgcaccaggccatacttattaactagctgctgacaggtggcgccgggaggtgaattatgggccttcgtggcagaagatggctgaataaactatccttactggacatgggcatacaattgctagctttgggggacatgctcaagtcactgtgacccgacttgaaatatgaggctggtggacgattttcccctcaggtttaaaacagctacctgggtattattttttttcttaaactcattcattatactctatctcatgtttgaaaaaggaaatcagtttctggctgcttgggaaatactgaataataatactttaaaaaatagtaaagtaatcatgcagggtttcttgtttcctccgtattatgaaactttgcaggcattcgacgaaccaggaaattgcactttgaacaaaaacatgcagagtgagctggctctttggatgaaaaggaaagggtgaaatgcagaaaactcagagaaatcatcttcgtgcctgaagacagctaccagtgccacaggaagatgaaaatttaaatgagtgatcctggtagactcaaagtcagactggagccctctgcctttcctaggacgtcaaaatgaggaataggtttttaaaaaatgactatttgttggctgggtgcag

SEQ ID NO: 70003 - DNA, 891 bp, Homo sapiens
cctatggggctgcggaaatatcctaattaatggctgtgcagtgctttcaaaatatgaagtagtacataaaagcttaataaatgacagttacagaaactatacatttcctcattaaggtgtctaattatccctcactgaacttgcctaattcccactggatttaatataaattatgtgcatgtgtgcaaagtagaaagaggatttttaagtgactactgcttcaagttatgaaaatggttccatttgaaactggagccttttaagctgaaacaacacggatttggctttggaatgcgtgccccaaatcagacttttgaccctgcttttctgctgtcaggtggaaggtggtgccaaaaagcttgactttggcctttgcctggcattcgctgctgcctgatccacccattcccatccttgtcgtcggggtctgggagcttggagcaagccccttgcccctgagtgctctgcacagaggcaacatgccttaaatttgacaaggactgtcaagggagctggctgggatgcatgtgacccgcagcactttacctacagctgttgtgctgggagcacagagaccaacgctaaataaataaatgaataaataaattaaaaatcaaaggattctctcatgaacatctggtcaagtagcagggcttttcatctgtggatcagagggccatgttttctttttagcaacagctcagtaatcaagatggcagggaaagaaaagtaggtatctgtgcagagaggaaagtgagaataatgctattttatgagctagacattattttttgccagtgcaactgccaaaaaaaaaaaaaaaaagagaagctaaacagggtgacaatgatgataatacctactatttatcaagcaactgcagtatactag

SEQ ID NO: 70004 - DNA, 969 bp, Homo sapiens
ggccctctaatctcttaagatgtgtagtaataagacaaaatatgggctttgaagttcttctgacccgggataaaattcccagctctactgaccatgtgacctcagatgcctgtgggggctcaggtccttcatctgcaccactggcagtggcctggtgcacgggggccagtcccttttaccctgtggaggcctgcaaaaaataggagcttggtgtacattaacagctcctgccttctactccccttctctttctatgaatatttgcagagaagttaaaaagtaaccacattgccaactacactaatgagtcaaggagaaggactgctgagaaaatggcatttctcctccttcgacaaaaacaacagagccatgtgaacctccattctgtgactggggcgccaagaggccgggccttgccaagtccccccctgtgctgtttgctagtgaagagtttggagttgactaagtgccaacctcagctcggctgtgtgtgcttgatcctatgaccagcccagccctgaccttttctggtatttatgatgttggattggattttgatcactgtttgagctcttgacacaaaataaacaggatgacccttttccctgggagggacaagtgccaggattttaatcccgtctccaaacactcctcccaaacagtaccctgccccactgcccccatggcaaaacaaccaagacacagtgtctcttttgttgcagtagccagcagatcctgggatagcaaccttagggcagtgaatctcaaccctggccacacttcagcattatgtagggagctttcaaaaatacggcaggccactgcccataccagaggttctgacttggctgatatggggtagacctgggcatcattattcttcacgtgctccccagatgattataacttaaaggcagtgttgacaacaactgcactcagagaagagaaggtgcccagttttcctataaa

SEQ ID NO: 70005 - DNA, 1833 bp, Homo sapiens
ccctctaggagaggtgacaactctcactgtcccctcattactcatctcctcatttgcagagcccgtcacactgcttcacacccagtagggattcgataaacgccagttgaagaaatgcatcactgaacactcaacatcagcataagaaaatgaataaaacaccatgtaattatagaaaaactgcccctcgtgagttcactgtgatcaggaagagaaaaacaaacagacacgataggggaacttgaaaagagcagcggatggaagccaagacacgggcactctgatctcaactctgggaaaagcctgcatccctctaagcttccgtttctttctttatgaaacaaaaggacacgtccacacgttctatgaagattagagagctgtgccatactcaatttcaacagctgtcctaaatgatgtcattgttagtgtcattattgacacgaataagaaaagtaaattttgatcctgataagggaaagagtcccggggatcaaaatgtcattcccatgatttggtgaagactttcctcaattagcccagagctcagaagccctgagaaggaagcagggagtgaccagggcaagcaaggaaatttactctctgttcatgaatagaaacagaaaccaacaggaatatcctgtgatttatgaaaatgctgggatttaaaatcattaagtagtattttgctttcataggatatggagctaagaggaatggcagaagggattttaaacacagaaggggctagcgtgcaattaaaaaaatatataaaactaaaaatttcactgtcgaatttctttctcattgtactcatccagtatagaagaatttttaaaataatataatttttaaaaagacatctgggagaggggtattaaaataacagcctaagatttgtgctaacctgccacttctctcacatatccatgccacagttagtacacctactgagctcacaatttccccctaggtactctcatataccttgaggccgtgacgagagttacaataatagctataaagaaacccaccagactagaaagaacgtcttgtaaagaaagccaaatacatacatctccttaaaatgataaaccacaacgttaatgaaagcaaaagccatatgaacattttcaaaaactctagaatcaatactcatctctactacctcacaggctttcttggcaattagactatccttcgataaaaagaaaaccaatgaacacacgtcccgaccagtatgtgaacactccgctatctgcatacaaaatacacacatttgatatttatctgttaaaaacatcttcatttactaaagacatgtaaacaagtttctgttttactctattatttttcaaatccaagcagagttgatattgaaccatatttgtaattcctcacccactgcattagcacgacctcattcgaggagacctcacctttttaaaaaagtcaacccctattcttggcatgctgatacctacaaggatatcggggaaaaaacgaatgggctaccattacctttgaacttgtggaacacagcccacagctctgcaatgtcagtggcaaaggtgatatccgtgtcaaggacgatgactctctccaggttggcaggaagagtcttggtcaggacaagcttcatcagaccataaatcccagagtaatgtttattggggatccaggaaacttcagactagacagaacaaggcagagagagagttggagaaagggaaaaaaaattgctatattaattctttgcttaaacattataaatagtgcctagcacacaaaaagtatccaataaaaatttgttgaataaatgaatgagttttc

SEQ ID NO: 70006 - DNA, 1232 bp, Homo sapiens
acatagaaggcaaaagtctcttggtgtagtaaaaggaaaaccttgtcaatggcagtccaaatgtcttctggctgacagccaaaatgaatctcttcactggtcaccctgaaaagatgatggcttcactcagctcttgtaatacatctaacaaacattaaccaaaggtcttattgcaattttgaatacttttaaccttgaccttcaagccctgcttcagaagatttagaccgtggtaatattgacattcacctccccccgccaacaacaggcctttactgtttaatatgatggttgtcaaggcaaccagattgtgaggatggctgtctaacctttctagatttagaatttatcatacatgagaatgcagaagggaaaaatgtcacccttaaaaagtagtatagaagacggtacaaggtacaaggtaattccattgtgcctttacttccacttggggatttggctactgatcaaaggaattcctaatgctctaaatcccctttaaaaaaatcacctaattccgaaagtgagtcatttatctaaacactcattgtgtgtgccaaattctgtactagatactaaggaaagaggagtaaatgaaaaatgttcctctttcttagaagatcaccattaaatgggagaaaatattattatgtttataataacaatcgcatttgttgaatgcttactatgtaacagacagtatactaaagcaatttacaagtatcttttaattcacccaataacctttattactgtgtgtgatgtagacatcaaggaaatcacccaattataatgaattataggagctgggattaaaaatcagatttgcctctttccaaaaaccttaatcgtttttggaaatggattcaaatatgatactcacatgattattacacagtgaaatctgtatataaattcttaccaacattcttagaacatagcaaaattaattgtactcagaaatgggaagtaaaatcaggaaagacaaaggtgactactagattgagctcatactgttagcagaaacaaacattccaatgcagttataatagagtcatacaccttctcagaacaaatgtttctccaatctctaaaggactgcaagtggccagtaacgctctactgagaaagctgttaacaccaaaatacaaagcaggaagggaagcttggaaacatatgtccagacccaggaagattgttacaatggatttttaacttctgtactttagagt

SEQ ID NO: 70007 - DNA, 1035 bp, Homo sapiens
agatatacacagtctatgtatgaacatgatgtatcgttctatcatgcaatacgtgtgtgtgttgatctgcggttcagcccactttcagcttaaaatgtcaaacaagacattattcaaaaactaagctgacaacatcatcctcctccctgcaaaacttctcaacaaacatgaatttatcatcgactctgaatctctgaatccacttgagatgaatgttctgaattaagaatcaaaacatctaagattcagaacaaagaaggtaaattgaaaatcaacctccgtgcagtgcagtgacagagattagggacttaccatccaaaatgtcctaagtgatgatctcaatcaatctgaatgtgctgagtatctctggatctctccagagtgctggcatctggtactgcatgtgggatccaccactttgaaatgaataggactgggactcattaatgcaggcagggccagggtctggatgggcctcccatgaagggggctcagaccctttcaggggtgacagacccagatctctctagtctaggaaagcaaactcttgcacttagtgccagatttcaggaaagctgtccggttgcatcatcctgcccgtgataaagacactacatccctaacctttatatggcaaaatctccctacgtacaatctgtcactaaagcctgccaattctttcttcctgatgtttgaagcacttgctcttcccatttgatttcaaacatctcatccgaagccaagcctcttaatcttatcctaaaacaggggtcatcaaactttttctgtaaacatccagagagtcaatgtgctttacttcgcaggctatgctatctctgcttcaagcacttgactgccattgtagcataaaagcggccatagaaatacataacaaatggctgtggctgtgttccagtcaaattttatttccaaacacaagcagagggccagatcaggcatactttttggccatagattatggatcctgtcctagaacattgtgtgggtctcctgggctagtccccctgcctctga

SEQ ID NO: 70008 - DNA, 708 bp, Homo sapiens
tgccccccataaggaaggattctccagcccccaaaatctagcgcttataaatcactatttattttcacagctactcttttttttttttttttccagttgaggaaactgggccctgagacattaacttgcccaaaagatcacagtgggcaacattctagagcacagtggaagccgacaggtaaataagtagatgggtagagtgcaacagacaggcagacagattgagacaaaaatgggaaaactgggaaatatggaaaagaacagggaatggatgaaaagtagtcctaagccaagctctgccaagaaatgacacatggccctgggccttcccctcctgactctaaacctgagagcacacagctataaaattccaggaggtgtagaagatcactgacttccagctttaacatcttcaggacaagtttttccctgcaactgaaatattagcattatataaatactcgtaaacacgtggcaatattcaccgtacaaatcctaaattccttcccctttactcagcaaaggcaggagatgccaaatgtcttatgatatactcctcccctcctcctttccttgcttctaaaaatatctgtgaacagccacctgtgccaagcactgagccagggctggaaatattctaatgccagatgtgcaaagtcctttttaatatggtgtatttgtgaagcttccattacttggccagcccca

SEQ ID NO: 70009 - DNA, 759 bp, Homo sapiens
taaagtatgaatagtatttccatgaatacaggcagcaactctgccccttatttatggcttcacctgccacgaaaccaaaaactcaagggtgtcaataaatggattgtaacgttgttgtgatgtttaattacaaagaaaataacgtctctgcgggccctttgggaaatgcactgttgtctgtagcaaccagcagggagcttcatggaggcattgcctttgtgttctgataaatactcagactttcccagagcctcaggatctctgggtcaggcagggtcagatgggtcaccttgcgtaactgcctgtctcgctcagctccctcccacgatactggacttgtgtttctgcatctttcatgccaggtatttcaccacctcctgggcagctcattccagctctggtcagcatgatcctcattatgaggagcttgacatctggctccttgccacgtccctccataggtttggggccaccagagcaatcccaatctttctttcaggggacagccctttgtctgtttgctgaagctgagcatgtacaccctgagcctctgcttctccaaggtaaacatcctcaattcttcccaccatttcttacataaccagatttgaacgggcactgtcactcacctggattttcctaagcatgctgcctcatctagattgtccttacagcatagagtccacaaatacaaatgcggcagcccgaatgcacactaactgacactcagtaacagaaatctgttgcctctgtcatcct

SEQ ID NO: 70010 - DNA, 1135 bp, Homo sapiens
ccatccattttatgaattagaaaactgaagtattcagatgttacacaactcataaagtcactcgatgagtaacgggtgaacagtatctcaccccaggcctgcctgtttcacatccagcactctttctaataccctaaccgattactaccagagtggctagtgtgaatcacctaccctaggctaacaatgcacaacatgaaaggaatcaagacaggaagaaacccagtgcctggtttctacagacctctgacaagtttaaaaaagaaacaaacaaaactgtaaaacccatgtgtagtgatcacagggccaactggaggggaaaaaaaacataatttgttcatttacaaatacttttaagctgcttgtcaaacaaaatgagtttgtctgccagatgagatctcaattttctaagttcattagcagctgatgaacggaaagggtcacctggtgatttcataatttggccctgaatcttgtcaaagccacttaaaaaaaaattccaagctgtcaagagagaaaggaaatgccattttatctaatttgtgcactatttctgtgcaaacaaggggtagatatttagacatgctgtattaagttgccataaccagggcagggtggtaaaaaaataaaaaggagaagaggcaggactgtttaaaatgcacagtaccagaagccacaggcagcactaaattgcctggaggccaagtctgacagcatctttattatttttatttttttaatcctgtaggtagcaaaaacatgcttctaaattacaaaaattcctcaagaagtacattgtcttttgggcataagtagggcacagtattcaggtgctgggaagacagggaaggtggctttccaagttctaataaggcccttcttagaagaaaaaggctcttatttttactatacattcattttatactgcaaaggagcaccaaagttcttattcaagcatattaattggaaaaaagcatccccaatatattctctccaaattgctccaccaggagctatcaaagtgagattcaatattgctactcccaaaaggcacttctcttttgaggaattaattagatttggtccctggaattccatctcagcctctccaaagctgagacaggttacctgggaa

SEQ ID NO: 70011 - DNA, 1129 bp, Homo sapiens
gactgtaagctccttgagggtagggatggtgccctgtttaccacactatccccagtaccatgcatagaatagagactcaaatgctggactgatggatggatgaatggatagatgggcagaaggatagtcagggctgcatcactgccttgagacagcagcagaagacatatagatttaagtggccaaagcccacagaacagggctttccccagaggcccgtggccacatttttcctcttcctactttcagaatctacagcacttttagcccacagtccctgggtttcacaatcactgcctatatttggactgtactcctgatgtggccttatcctgcaggcctctatctctcgctcactctctcacatgtctctctcgatcacctttaacctacttctgctcctgacctggatccctggcccacccacaggttggttcgcagtttctgaaagagtcacagccgtgggtgtcaggcccagcccagcagacagaacacgtttggatgcactgttatcataaagtactgctgacttctactgtggaacagaattcagtgacctctgcttccacgtctgtgcaggacaagctccctctgcttttgctccatagccccaagtctagcccagaacctactccccttcacccatcttcaagaagggaaggcacagctgggagccgtaaaatgccactatacccatgagctgcaaccatttgttccctccagcaagactgcagataatttcagccggaccttctcttcttctcactctgacctcgaagtagattttgtttcatctgtttgttttcatgacagaacatcctggtagggaatattggcgtctttttcttttcaaagtgacactgacacaactccactttgtgcaaataaatgttttcaacctaaatgagtcatttggtgggaacagtgagttcgcaagcctgcatataggttgacccctttaccaaggagggtggcaggtagcattgtgtttggggctgacaaatattatgaacaatgagatcctttccatggtgatatcccttgctgtacgcagggaaaataaggataaaaatagggtgatagttgaaaactctgggccaggcagaatgcatccttggggagaatccag

SEQ ID NO: 70012 - DNA, 784 bp, Homo sapiens
ccaacatgtccagcatattacgtattctcagcaatgaaaaagaaatgccaaccacaaagctacccacaaaggtggcatctgacaaaaagggctctaatgaatgaatggatggatggatagatgaatgaatgagggtgtggggaggaggctcaataatgcacaagcaatgaactgggctctgggtgggcccagagttaattaccccacggtggatggatgtggctaactcagctgttgccaggtgacactcataaatgatcataaagcagtctgtaaacagtgttatgtataaaaccttaatcatcatgaacaggaatcttaagatccaaatgcctgggataaacatggcctttgcacacatgccctctgccttctgttctggactctgctctgactcatcctgtgggctgggactgttcactcagcagagggaccaaacagcctttcactggccctggacaaatgaaaccccctaagagggaggtgtcccactgcccagaaaacccctccccagccctcggactcacctgccggcctgagcaacgtgccttctagcgctggttctattattcacgacaaggggctttcccaggaggcagcaagtggcactatgctgcctgcgtttctatttccaaaatctgaaagctctgtttcataggtttgcagctccctgacagctaaatgtcatgggatggagccacgttgaatcactggatctacttcgcaccagcaggctgggcctcagaaagttatttcaagtcctctagtcccgatcgctcctttt

SEQ ID NO: 70013 - DNA, 929 bp, Homo sapiens
ctgactgaatccggggacaggacctaagacatgctgaggttagagggatacagcaggccaggaccacaggcacgcctcacctcaaggaaaccctgtgcagacaaagggtagaaagctggtcttcaggttttcactcctctaagaggctactgcaactgtcctcactccccaggacacctcctcttccaggagcacatcagccgccgctttgatctgacctcacaactttttcacaaaggtctcagggcgtgacccaaacagaaaggcaatgtaacacgtggcagctgaaacggagcaatttgctcaacgaactgcagctatgtttattattttaaatggattataaaatagagtatttgtcctgcttttactggaaatgttagagtttgagggtatcttttttgaaatatatttcatttttaggtaataaatcttgggcaagacactatttccacccaacgatcactggaaagtgtggagtcaggtccccctgggttcaaattccaccttggtacttaactgtctttgaaagttcaggccagtaacttagcctgtctgtgcctcggtttccttgtctgttaaacatggaataataaagttcccaccatagaaaagtagtcagaggactgtaactgactctgccaacattatatacatgtgtatggagccactgacatgtcagatgctattccaagtgctttacatggattaataattcacacagctctaaaaggtagggactgttgtgatccccattttacagaaggtcagcgaagttgaaaaacgtccaagatgacatgactaagcagaggatacaggattcaccccaggcagtctagctccagagatacaccactccatctatgaggttaggcccagtggccagcaaagaattagctgctcaacaactcactcactaggattataat

SEQ ID NO: 70014 - DNA, 1238 bp, Homo sapiens
acacaaactttggagtcctcactccaaaacttcaaaagcagtgacatttacaagaatgtctggatagctatacactgatcactcctcacaagcagctttgactaacaggaaggacatgctggctgggcttcccccctacagatagcaatgccaaccaaccactctgtcctaaagagggactcgcaagctgtggctgctcgcccccaaattgcgcaggactgtctgcaagaaggaacaagaaaagttattcacagcatcacaccacgaaaggtagttgcgtaccgcccaacagggccctctccaaacacggcaggctccgcgaaccacaggtgctcaccgctaacaagagggccgggggtgcgggtatcggtcacatgccctcgtggtgttaaccagaaactcctcctggctcgctccctgccagcagcctgtgtgcccagaagccgagcaggccctgagggggtcctggggacttcggagactgggggcttccacctccagcctctccagggctcccggccggggcagcagagggtgtgcccggcctccccgccggcatcccgagtacagggggtaccagccacaggttcggagaacttgtccggcgctacacaccacggcgcccccgcggcgactctcgcgctccggggctcttaccttggccgtgactgccgccaggcagagggagacacggaagaacagggtggcgcggcggcgccgccgcctacgaggcgcagggggtccgggtcagggtcccggcaggcgctgccctactcggagcggcggtgccaagcacagagttcgggactgcccccggctccaaatgccgcggcgagggtccgggtcccccaagctgagcactgtcccttcttcctcttcctccggggccgctgcctggagctgctcccggcccgggggactcttccgagccaggggcgccccgcatgggcaggggcctgggtcagcctcgggttgggtccagggagcgaccgccggggccgactccacctcccgcgctccaagccgattcgtcccttcagggcagggcctgcccgcgaacagcccggcgagacgagcgcggccgcgcccccagcttcgggcgcccgggctccggcgcggcggcggggcaggagcagactggccgggccgggcgccgaacgcggcggcgcggggggggctgcaaccggccgcggcgcgctctcccccagggcctgcgccgcccgcccgcggctccgcgg

SEQ ID NO: 70015 - DNA, 1947 bp, Homo sapiens
gccgggagcgctcgccggccttggccgccgccgccgcctccgagatgcgccggcttcccggagcgcccggcgctcggagctgggcggccgctgcagccgccgcgggcagccgggcgccgctggccggagccggcgcgcgatccccgcctcccgcgcccggccaggagtgggccgccgcgcgggaaccggcaggggcgggcgctggggtccgggctccgggctggccccgccgcctccgcgtgcccagagcgccggactcgctcagcagctgcagtgactgtgtgtctgtgtcatgtctgtgcagccgggggggaccgcgagccggggctgggttccgagcgggggcggggccggcgcccgcgtcggcgcccgcccccgaccccgtgaccgagcggccggccaatggcaagcgccgcagccgcgcggaccgagagttcgcccccgcacaggctccgccccccggcgagactccgccccggtgcttcttcagctcgctggctggcaggcaggcggaagcaacacccggagccgggatcccgggccgggtcgggatgaaagggtgcaagctgggagctccccgcccttcttcccccaaccccggcggctcccggccgcctcgggcttggcgtgcctcgcggaaaaagggggaagggaagcgggacgggcccgcagctgccgtggtagagaggctcgcaggcttgcaggaccatgcagcctgctccccaaattgcacaaaacagccgtcgtgagaagtaggaagtttccccgcctcgggtcgcagcttctctcggaggtgggcatgctgtggggcagccggagtctgtgaggagccccgccgaagggctctgacggcatctttctgggatcggtatccaagaatcctgtccaaggcttcctcttcctctgaggaaactacatttctttttcctccaccccaaacacacaccccatgcacgcacaacacgcccctcccctgctgattttattctcgctctttccctcttggcataagaacccggcgcgcaacatcccttgaatggacttccagcctcccagttctagggaccagggtgggggtacggagagtcctcccgagccacaggagaagtgggtgaaatgggtcggggcacaggagcgggggtgtgagaatggatggaaggaggatgccctcgagagaagacccagaggaggcgaaagcagagaggcagggagagaaagaggacgccgagagctgcacaactcggactcggagaccggagctccgggcgcgcgatccagctcccgggtttttccgcagctcggtcccagggcttctggggtccccttccccccgggtctccacctctccccagccgggcgggccgccgggtctttgccttccctctgcgcgcctctccgctctccaggactcgagcgaggcagcgggaagcccaccctagttcttggaaggggcaggggaaggatgggctggggagggggcgcgcgggaaagggccgccgagcttgggttgcccagctgaccccactcctcgaggtcgggctgggggggtggggcggcaagggcttcggaggcttggcccctgcttggctccggacctggctcccgcctcggtaaccacactctcggcctttggctttaccgagctgggacccttctcccatcccccttccctccagcctcgtgaaacaacgacccccaccagcagcagcagcgcccgctttgccccggctccggagcgctgtttacctaatctcagcggctgaccgagcccagcagaatgcgaaagggaggcagcggtggtacagcagcgtccccggcgaagaagtaaaagacgtttgctttggagcttcgggataagttaactgcgaagctggggtcctgctgtcttacctctgcggcgatgagcctcaccgtgcacgttggcaggcatagcagattctgtttctg

SEQ ID NO: 70016 - DNA, 630 bp, Homo sapiens
agctcaggctcatttgaaactcactcccttaacaagatctggtgtgataattctaacttcacatcaaaggttggaagaaatttcttctaggacaagtaacgcttggagtaaatggttctttcccatctagaatgaattaatgaaggcagaaaagcactatgcaatcatattttacatatcattttttctatggattagcttcttgatggtgtttttaattatttaaaagtattgagaaaaagctcaaaacaacaggtctttcctatctctggctgatttctgtctgttatgggccatccattaaagtcacctggggttggttacctaggaaatggctgacacactggggcttttagattggtcacctgatttatgccaagaagatgagtcatgtgatgggaatttagttgcttctaagtggaagagtagaaattgctgagcattaaaaaagaaccactggaaccttcatcctcccttccttaattttaaagatgaaacaaatgattttctttcagggagatatagatatctaaattcatctccagaggaagggagtctaatgattccaagaccatctcagacttcatggttatgagacactatattcaaggggtgtgtgtgtgtcagtga

SEQ ID NO: 70017 - DNA, 2154 bp, Homo sapiens
aaggatttagagacctgaacaacatatcagtcaacttgaccttattggcatttacaaaatattttacccatcaatagcaaaatatacatttttccaagtgcacatggaacattcaccaagattggcataaattaagctgatatgttttctgaacacagataattaaatgagaaatcaataacacaaagctgtctgggatatacccaagtgtttggaaagtacataatatatttctaaatatccgatgagtcaaaacataaattgcaagaaaagttatagaatgctttgcattaaatgaaaaagcacataacatatcaaaatttgtatgatgcattaaagcaatgctcagaggggaatttacagtttaaaatgcttatattataaaaccaattccttcttatgctccgattttgcaggtaagaaaattgagatgcaagcatgttgagtgatatacataaggctgcatattggttaaggtaagacttagaatgagactcttctggattagttctctttctcttttactgtgccttttaatcttatttttttggactgtgctcagtgttttcagaacaatgtgtccactcagtgttttgtcacctcactctctgctgaactctaaccctgagtcattattctttatagtcattaataagcatgttgggaggatgcagaatgtgttggtgtaaagcagatgctaagaaatctcaggtcaggagaaacagactggcagtgtggaagaggtggatgctgctgtgccctcgaaggcatcagaagcaaggggacatggaagagagcatctgtggagcacctactctgtgccaagtgcagtgcagattgatttcacagcaactctgatgtagttcagtaacctgactaacattatgcaatgagtgtcagctcttgaatttgaactttgtactgtacaaatcaaaaaacccatgcttaggaggggttgaattattgctccttctattgggcttatgttcaattcagactccagaactcttatccattgcagcacatttattctacttcaggcagggaacagacacaattatgcttttccttttctgacaattaaccacctttcctggtttttatccccagctgtgctcctgagggtctttcctctcaggaatctattctcgctgcattaccaacactgtgcttgctacaagtcaaagttgcctcactccatttcagtaagaatttttcttttatcaggcagtaatcctcttcctttttgggagctgccaaaaaaggccataatctcaatcaaaaaaagattttgtgtttgaagtcaaagccggccagtgcagcccatggggattatcgggcagggaccctgtgagaacatccagcctgctggccttgtgcatgctgagcttcctgcatgtccacagctgcaagtcagtgtgtgcatctgggtcactcacctgcagagctggacaccctcaggggcctggctgtgccctgtcagaaattaccctcatagacatcctgtgcctccagatgtgtcatgggacatggaaaaggggcaagtccaacttctttggatggcttttctagcaatgctctgatccctacacatagatttaaattggtgcgagcaataaagcataatgtggcctctgggccaggcctgttagtgtttgaactctgattctacaacttactagatatgtgacttgggcaggtcattcatcttgcagcactttagttttctcatttacagaatgggcataagactagtccttacaagccaggcatggtgactcacacctgtaatctcagcacttctggaggctgaggcaggtgactcacctgagcccaggagttcaaggccagcctgggcaacatggtgaaaccctgtctctccaaaaaaatacaaaaaattatctgggcatggtggtgaacacctgtagtcccagctacttgggagactgaggtgggaggatcacttgaccctcaggaggttgagactgcagtgaagcaggatgacaccactgtactccagcctgggtgacagactgagaccctgtcttaaaaaaaaaaaaaaaaaaaaaaaaaaaaagaatagttctttcctcatgaagctgactccagaatgcttatccattgcagcacatttattccactttcaggcaggga

SEQ ID NO: 70018 - DNA, 1294 bp, Homo sapiens
acaaatcgttagtttttaagacttggcctggcacctaggtcttctgactctggtgttggtgattcttcttccatttcttaaaggaggacttttggaggatgagagttgtttcaatgtggagcgggtttttgggttttagtcttgctgaatagcatggaagcagagagactaaatggcctcttgacctcttggaaggcatgttacagggggatttgaaattccatggagtaacgcagtcactgcattagtcatctataactggcctgctgatcttcaaaatctcccaggtcagactcaggctggcaacttcagacacaaccacatcgttgtgattctcaggaatatccagtgaggggaagaggctgcactacttgctgatgaatccctcacagctactatatgagatgggaaggataagtgtaagtatccatgaaggactctaggctcagaaagtcaatggagttgcccaggttcacacagatcgttggtggcagaatcaagggctaggaccattatatttggagaggtaggttaccattcctgtacaaatattaaataccatactgcctttttattatatttggaagagttcactccaagggcaagagtgatatgttttcaatgagaccggcccctgctggtctcattgagaacacatgaggtgaggggttggttgctgacttcattttgccttcacttgttaggtctgatgcttgccagaaaagttgttgggaaggtcacggtaacatttgcagctaatagtcattgagcacttttgctgttcctgacaactatgccaagtacctttgctcccattagctcatttctctttcatagcaacctttgaactagggaatgttatcagtctcattttatagaggaaggaattgaggcacaacaaggttaactgagttagatagtgaagcaaagatttgagcccaatgacaggcttggaagcctacaggcctaactgggtaacaattgcagatatgtttcttattgtcttgaatcatgctgcttcatttaatggtactgacctcttgttttttcttgaagctgttgcttattttggcctcaactgtgaccacttctgggtctctttcatttacctccttccagttgccagccacagcccctggtagtttcccagtgttctcttatagccttcagttactttcactagacatgggcttcttgggcaatcccagctaattgcatgcattttacattaccttgctattaactacactgctgactgtcaattctgtattgccagccctgaactcttcctggt

SEQ ID NO: 70019 - DNA, 587 bp, Homo sapiens
tcccatttctgctaacagcttgctcaccatttgtctagtcctcataacattttccttgcctcttttcaaagctccatcagctggtcccaaagacaatgcacatgttttagattttggttgtggtagcaccccaattttaggtagcagtttctgtaccagttagattttgctgtgtaatgatccactgcaaaatatactggcgttcattctgctcctcattctgtgatcagcgtgttcctctggtttgagtcagcttggctgacctctgctgggcttgcacatgaatctgctgtcatctggcagaccaaccagtgactgaatagtcatgacctcactcatacacctggcagttggcagactgtcagttgaggcaactgtgtctctcatccagcaagctagaccaggcttcgtcacatgatagtagagtttttaaaatagacatgggaagtcctagccagggcagccaagcaagagaaggaaataaaaggcatccaaataggaaaacaagaagtttagccatctctcttcactgatgatatgatttgtatcatcatatcatcatatttagaaaaccccaaagatgccac

SEQ ID NO: 70020 - DNA, 1014 bp, Homo sapiens
agcttcaccaccatctcctcagaatgagtcatggttggtctaagccaaaagtggaaattgacttcctcttggactgatactgctttgggggtagtcatatgatcaacttctgaacaacgagatgaaagaggaaagttgctggagactaccctgttaaaagacaacaaacggtggttagagaattatttctgcggctgccctccttccttcttgattgggttgtgtcattaatgtatttgaaaaatacttactgagttcacactgtgtgccagaaactaaaataggatctctagaaaagtagtaaacagaacagacaaaatccctaccctaatggaacttataatggaggaaggtagatgataatctagtttcaaaaattaacctgtagtggtgagaagcaatatgaagaaaagttaagcagaatgggaagatagcgatgaggtgctgttttatacagtgtgaccagagaagacctctttaatcgggttaaccttgagtaaagagtgaaaagaggtgagggagcagatatcttgtgtaagaaaattccaggcgagagagtaataagggcaaagtccttcaggcagtagaatgattggcatgttggagaaattaaaaaggtatctgagtgactggagcagggtaagccagtgccaaacttttggaccatgacccacagtgagaaataaatcttatattctaaccaagtacacacacacatgccctcacacacactgaattcaaagtttcacaaaagaacccacctttactgtgtgtaatgcactgtgatagtgtctcttatattttattctatttcattaaaatgtcctggtcattactatctaaattgactatataacattctagtaggtcagatcccacagttatactgagtttgggtgagagtgataggaattaagatcaaagaggtaatgggaggccagagaacagacttcttggattctgcaagcaagctgaataagtaggagggctattagaacatttacagttaaggaa

SEQ ID NO: 70021 - DNA, 792 bp, Homo sapiens
aacaattggatcccacttcctcctacagactcaactccccaatgctccacttgacactctgtgcttcagtaatactacctttcctgccatggacttcccagtaccactctgtgcactgctgtgtgctgtgccctcagcctgatactgccatctgcctcaaaaggctttgttacttactcgctatgaaatactgagcaaattactcaaggtactcttttgcctggattactattacttgccttttaagttcaaattcgagtgagacttgtctgaactcattccttccccttaatctggattggggcttttttttatttcttcactaaagcagaggtcaatgaactgtggcctgtaggccaaattgggctgccatctgtttctataaataacgttttattgaaacatagacacactcatttgtttgccttctgtctagctgcttcatgctgtaacagcaaagtttagttgtaactgagaccatatgtctggcaatccctaaagtatttcctctctgaccctttgcagacaaaatgtgcccattcccattctaaagcaccatatcacagcacacactacattatatggaatcactttctttacatatccatccctacactagaatataccttcttgaattgaaaatctcagcctactcgtttcttagcaaaacatggtggttaatagtctgagtctgaagtcagactgttagagttagtattctggctttgttaattactcattatgtgatactgagcaagttactcaacctttcctttcctatttcttaattaa

SEQ ID NO: 70022 - DNA, 1558 bp, Homo sapiens
cttgaaagaaacagcatagtattttggggaaagcactgcattcagaatcagaagacttggagtaatactcggtctcacattccaactacctgtgtatccttgggcacgtcacttaacttctctcagcctggttctcttctgcaaaatgcgacaggaatacagtgaggattaagtgaaataatgtttgtaagcttctagggcaaggctgggacatagcaaattctcaataaataagtgccagctcccgcgctcagcaggctccgagttttattcgatgcgctcggcgctcttggtcgagcgggattccccctccggagcccgagtctgcgctctgggctcgactgaggctccctggccgctcgcgcttttctctccttctccaagatggcggcgatcggcggcgttgaggcgggatccgggcgagccgagtgaaggtagcggcgagcggagaccccaggagaccgggctgggcccccaccctgaggcggcagcagccccgccccgtcgccacccgccgccctgggcccgcgacatcacctctggggtgccccaggcccttcgcggcctagcccaggggccgagccggggactggagtagcggccgcagccgcccccaggaaggggctggagcgggcagaaggaggagggcgggcgggagctgttcaaacggggaaggcgggaaagctgcggggccgggagggggcgtgcggccgccccgggggcctgcggacccgggccgcccctccccctgcccgggccgtctccgccctcgggggcgccgtgaggccgccggagacgcgggaacccgggttcaggtcgagctgtgcggctcggaacccgcgatgcgggggtccctcgggctgtcagggggaaagggctcgtggccgcggccacgggagggctggggctgcggctggcaggagaaagtacgaggagctttcttcttttcctcttcacagagctttgttgagctagctgttgccgcaaaactgccgggagaatcccactggtttgccttggggaccacaaaaatggtggtcctgggggctgtttgtgtaaatcacctggtattttgtgtgtttcttgcgtgcaacccggcttggccgtgccttcgtggtgggcgccttctccatgcaggcccattttccctccaccaactactacttgtagattcactttatagcgtgcaaaagcggagaaacatctctgtcccctcttttggagggctaagctggtggctgattatatttcctcctaatagaacaaagtaaaaaactgaatcccaaataaagcctgttgattggacaaggcttctcaaaattcgattgctggtcttatggaatgtgtgttgtcagccaatctgtgcggtggtcgtggttccgcttaattgcactgcaatgagaggattcaatccccatccccgactgtcgggatctctgcagcttccagagctggcaggggctgggagtgctgcctaggtaggtccctggagaagggagtggcaagaggattcggagtcaccgtgttcggagattggaagaaacctggacgaagttga

SEQ ID NO: 70023 - DNA, 3552 bp, Homo sapiens
aggcctttgagattcttagcttggggtccacggttgtacttcagggaccccagaaactccctgaggttataagcaaaattgtatcgctgccttttttcttcagaaaggctcatggcttttgtcaaattctcaaaggagactgtgacctaaataaaatattttttaaaaatggttacgagtccttgatctaattccagtatctagagaaaatgggagctatgtttggctcacacagtaaatttatggcagagacgggtattaaagccccactcgtgactacatctgtgctttttgccatcctgggcgctagagggaattgcgctgcaattcattaaattgcctctcagtctcaacagatgacaaaccccttgcccttgcctctgatttaaggtaagataatttgggctgcgagcagggtgcatcttggagcggggagaccttgacatcaaacaggaagagtcttaccgggacaaggagacaacagcccagagaggctgtcacccagggtaggtgtgcagtcacagtgaggtcccaaggactaagggctatgaccctaagagtctcggcttctgtgtaactcacccaagtcacttccctggtctacgacccagtttcccaaatgtgtaaagggtcctttagacctcgccctaaaaggtcaggggcgtggcttaaagaggaccgcgcttcccgggccccgaccccagaccctacatcgtgtgtgacgcccgccgccgccgagcaagccgcagtgaggtcatcgccctccgcctcgggggcgggaccctggcgtctcagggcggggcttgtggtcgagcttcgcggtgccaccgccccgcccacgcctcctcgccggcctccgagtgcgtcacgtgacgggtcggtggcgctggcggttgctgtcagctgattcccggggttggtggcagcggcggtagcagcaatggactttctcctggggaacccgttcagctctccagtgggacagcgcatcggtgagtccctggagccccccacagctccgccccggtgctccgcacccagcttcggtcccctgggaagcctccgggtgcctagtcacggaggcagggagggcaaggaggctggcgtgtagctctccgacctggctccgcccagctttcctcccactcttgattgacaagaacttgggccattaggaagccttggcttgtgatagatgtatatgacagccagtaggtaaggagagagggtgggtccggatgcccacggcgcagccaatgtgcgtctgctggggtccccaatcgagggagaaagttttcgtggttaaagggactgcgtggttggcagtggctgggccactctgctgggtcccgccgcctgggctctggccagctccttcctggctcaccgggccctccggacacagacacctgagaagggctagaagtcccttctcccaggaccgcgaagccccgggcttggcgtcttggggccaactggccagaggggcccagcgccggacagcccgcggccaggcctcacagacccgggtctcaggacgtgtccgcctgggctcttttctcgacccaacctcaaatggacccgcacagactctcagaacctgagcagacagtggtcggacaaaccctcctggtcagcccatctcggtgctccgtaggtggggcagccgggaactcgggccaagccaagcccagggcacctggcgcctgtctgctggtccgtggttctctgcaccctggtgacaggatactcacagttctgtgacgcagcctccctgggccgaggtttcctcacctgtagttggcgggcaataatggtccccacctccgtgggcttgttgtgaagattaaattccttaataaatgtgaaatacttagaacaatgcctggtacatggccagtgccatataaaaaaaaacagttgtaatatttattatcactgggctgggcacggtggctcccgcctgtaatcccagcactttgggaggccaaggcgggcagatcgcttgagcccaggagttcgagaccagcctgggcaacatggcgagaccccgtctctacaaaaaaaaaaaaaaaaaaaaatacagaaattagccgggcgtggtggtgcgtgcctgtgcacccagccactcggtaggcagagctgggaggatttattggatctgggaggtcagggctgcagtgagccctgatggcgccactgtactccagcctggacgacgcagggagagcccatctcttgaaacacatacacatacacacacacacacgcacacatatatataaaaatatacacatacaaacatacatatacatacacatacatatatattatatgtatttacacacacacgttgttcctgagatcaccaagtgaaggttaggaatccctggaaatcgcttggcagtagatctcataggtgctcattcttgggcaccaacaccatgagaaccgacatgccttcacccaaacagccacacttctccggaggatggtttgggtgttccgcattcttgcatgaagaaaccatcgcattaccgtgaaattactcttcatcttttttgatgacgacttttcgtcttaagtccagactgggaaaactttaagatgagacatattttccattcttagtgtcttgcgaaacctcacgaaagcttgtcgacccggctctgtgttgtaatcgccaccgtggctgtcggtggctcttccgaggttttgtaatcaatgctctccaagggggaggtggcagtccaggatttacacaccaggaagctcctgaaccagggagaggaactgccctctcaaaggacccctgccctccccggacacacacccaccccacagtgagtcatggttttttggagctgaaaagagaaggcagctctcctctcatctatatttctctgactacagaaaccactgcttttatcacatgccaagtttaagacttactacttaaaaataaacaagtaaataaaagacctggcttcaaagtcagccacatactcttaaggctttctggaaaagctcacctgggttctggatttcagctaatcaaagcaaacttctcttcttaccttgaagcgttgcctttcttgggcaagaaatacttctgtgcaaagagaatgctactaaatcataataccttaaagcacaaatggaattttgcaggtaaaagagccttaccttggggatcttctaacccagtggttctcatcagaattcctaggagggcttgttaaataatgtcggggccccaaccccagagtttctgactctccaggtctgcggtgggactctagaatgtgaatttctttttttttctttttctttttctttttcttttttttttttttttttttttgagactgcgtttcgctcttgttgcccaggctggggtgcaatggcaccatcttggctcactgcaacttccgcctcccgggttcaagcgattctcctgcctcagcctcccaaggtagccgggattacaggcacgctccgccacacccgactaattttgtatttttaatagagatggggtttctccatgtt

SEQ ID NO: 70024 - DNA, 6064 bp, Homo sapiens
gctcacgcctgtaatcccagcactttgggaggccaagacgggtggatcacgaggtcaagagatcgagaccatcctggccaatgtggtgaaaccctgtctctactaaaaatacaaaaattagctgggcatggtggcacacgcctgtagtcccagctactcgggaggccgagtgaggcaggtgaacttcaacccagtagttggaggttgcagtgagccgagatcgtgccactgcactccagcctgggcaacagtgagactctgtctcaaaaaaaaaatgtattcagaggattgcaagttggaagaaggattaggatttccacacaatagctagtaagggatcaatgagtgcccaagtgtggaggtgtttcatttacactgttataaaggtttattgtgctggtgaatacagcctcatctttcattcagtcattcagcaaacaggtactgcaggtttatcatggcccaggtcccatctggggtagacagttagtccatttgtgagctataaccgccacccttaaagagctcacagactcctgggagagagagatgtagaaacaaagagatcgcccaacagagttattttaatcactccactaagcagtgcttagagttgtggtctgtggaaaatgctactggctgctagctggaaggaataggccctggcggggtggggggtgtcagggcagactccaccaggagacctgacctttgatctgggcttaggagcacgagttgaggtggggaggagcacatttcttcctggaagaagggcagtgtgttcagaagcacagaagcctgaggagggtgatggggtggctgcgggcgatcagctgagctggtgagtgggagtgggaggaaggactgggccaggtctcagtgccggctcccgagggcttcagtggagcccggtgccttcaggtccatgccgtagttgtccaccgcggagcagtcccgtgggaaggccagggcagctggacctcactccttaaagaggaatattaatcacgaatactttgagctgcaggtaacaggaaacgcaaccagcagagtctgaaaccaccacaacaacgcactttgtttacctagcaagaagcctgaaggttggcagtttcagggtgggtttgacagctccacgatgtctcaaaacagccagactctttcttgttctgtccttagcctggtggctaatcagtgaaatacagtgattgttgttctgggaaggcagggtaggcaggggcagtcagcatcgaactgagcacctaggcagtgcagagcctcagtcggtcattccaaaagtatgtaatgcccccctctgctctgttgcaccagaaggtgggccccagaaggtctgccccaggcaggcagaggcagtcttcacagggacagagcagagtggagagcacacaagtttggagcacgcaggcctggctttgcatctagcaagtcacaaacctctgcacattggctgcccccacgacagttggggatgtggggaggtgacacaaatggaggtcctccgagcatcctgcacaggctgacacttcttcactgaatgatggctgtcattgttctccatgatgttgttattgtcatggtgcaggatgaggagtgacacggtctacccagaaggaggcaccactgaggagccaaccctgggtggggcttagaagatgaggggagttcggctgggcacggtggctcacgcctgtaatcccagcactttgggaggccgaggcgggtggatcacaaggtcaggagttcaagaccagcctggccaaggtggtgaaacctcatctctactaaaaatacaaaaaaaaattaggcgggcgcctgtaatcccagctactttgggggctgaggcagagaattgcttaaacccaggagacggaagttgcagtgagccgagatcgcaccactgtactccagcctgggcgacagaacaagactccgtctcaaaaaaaaaaaaaaaagacaaggggagttcaggagttcagctgactcattcctcctcttcatcagcacacctggcactgtctcagcacctggtctttcctgccatggaaacgaccttttggaattgtcagttgtggcctcccactggactgtaaaccaccactggggcaggaccttgctggatttgctcactgacgtctccctgtagcctggacaggtgttgagaatgtttgagaagcacatagcatcgtggttatgaatatggacttgagaaccagacttctctggctttgaatctgctgtgcatctcacaaactgtgtgactgcaggcaaattgctgccttctccatgcccctgagtttattcatcctctgtcttaaaggttgtggtgacgggtgactgagggtgtgacgtgcttattagtcccatgcctggtgcatgctgagtgccagatgagcatgtgaactggatgagcctgactgaatgaggaatggcattgcagacagaagctcagaggcgtgagagggcaagccacatagaggaagggggtacagctgactgtggctgacgccagcccctggagagttcaggcttttgatcctcaggcagtgagggtgatggacaatgtttaaacagaggaagttgtgcttggagttatgtttgagtagagcgtggaggtgacagtgcaggcctggggaggtggcagcttgagccagagctgtctcagtgatcatgagactgttggaatgtgcaggatgggagcgagcgggctccaggctgcttcccagaaggctggtgtggaaaggggtgatactggccggacacagtgggcagtggctcacacctgtaatcccagcactttgggaggccaaggcgggtggatcacttgaggtcaggagttcgagaccagcctgaccaacatggtgaagccccatctctactaaaaatacaaaacttagccaggtgtgttggcaggtacctgtaatcccagctactcgggaggctgaggcaggagaatcgcttaaacccgggaggcagaggttgcagtgagccaagatcgtgccactgtactccaacctgggtgacagaacgagactgtctcaaaaaaaaaaaagaaagaaaggggtgataccataccatggcccccatctctgatcctgcccgtggtgtggcgtgtctttggtgactactcattctttctcttggcccaagtcatagtcattgtagctcggttactcattgctagcctttcctgatgtcatactgacattgtctggctgcaaggtcacaacatcctgtgaggcaggcagtcttatcctgattttacgggtgcaaaaacagagactcagaggggctggatctttgcccacattctatgagttaggtcaggccagactcgtcccactccaccctcatctccatgaggggcaggtgggtcttgccatcatgccaggcagattatctggagccctccagggaggtggtatctgcaccagacccaatagggagaggacagactgctgtaaggacgcacaggtgcccagtgatccgaagccacaggcttgccagccataaacaactgcaaagccgcctgatgacaggtggaggattgcagggcccggttctgtcaggagctggaagacaagagcacagctgctacccggaggcccttgaaggttacagctccgaggtcggggaatcagttgtcattctcttggtaactggcaaccactgtccgtgtttttattcccccttcttaaaatagcaagctgaattacttctgtggtgaagaacaaaaacaaagcaaatattgccaggttcctgtgggtttaaaattctgccctgatggaatatgcctaccctgtgggcatctgaaggaaatccacatgattcaccgcaatcctgttgtccacacctggacctggaggaacctggaggaacctagaaggggttggcaagtgatggtctgggcagatgtcccacagcctcccaacagctgtcttgtactggaattgctcagatctgccttgtcccgattttgtctcctcctcctcttcctctcccctttctcgtttaggccacatatcccctcccaccccgcagaaaacctccgtcttctgattggctctgcccactactgcctgctgccactcatggctcaggagcttgcctgcactgcttgggtcacatcagactcatgcacggggtgggggcggggggtccttctgctcccacctgattgccgggtatgggatttctcttatttatcaatgtccccgcttccctttaaaagccacttacttgcctttccaaaacaaccacagcctctcctgaaacactgatgttccctcctccaggagatgagaggtgcccatcgttttcagggggtactggggacagaagaggatctgatggtggggaccactgagaggcctgccggtggagctcagggaggagagggccaactccctgtgtggtcaggaaggacacttctgggaaaacagtgttccccgcccctgctgagagatgcggatggcacagaagcctcaggcacctgcgccacagcgtcagcggctgccccgcccttacctctgtgtgccctttgcaagttggtgatctctctgtgcttcagtttcctcatgagatgagggcaataatgcacaccttacagtgtgttaaaattaaatctcattcttcatgtgaacagctaatgctgcttgatattctatggcatataacttgggaagttaaaatattattattgtggaagggcatgcaggccaggtcgaagactagggagacacggaaggatttgggcaggaaggacactgtcattttcaggtttcagaaagttccttctggacagtgtggagaatgggtgggaggagggaggcaggaggagggaagaagctgaggcggtagtctagcgggaggatggtggccgggctggggcaggggcagtggcagaggggatggtgtgatggacagagatttgggagctgacttggcaggacttcgtggcctttaggtgtggctagggagggagatgacactaatcctctggcctgtgtgactggggcttgctgagatgtggcctgtggcagaggagcaggttctgtaggttaacactgactgacatgactaacccccgccccaaaaccctccaaagcagggcacggccctctgctcagagggacacttgtttggcccgctctgttcttcccaggtggctctataagtgtggaacccccaagggcaggggtgtggtacaaagaagccacactcagtaaaccttcacaggatggacaactctgtctctcagccctgtcagaggagctttcctcatcccctcctccaggcctgatctaggggtaaagcaaccgccctctgcctcagccgcctggcatgtgtcctgggccaccctggcatccgtctggctcaggacctgagggtagaactgaagttgggccaattgcaaaaccaaggtctcagagccacagttttagtgttggttgagccagcctggctagaagagggccctgtccagtcccgcagaaactgccctcctctgtcctccggcagactgggtttagcaggcactgtggcttcttttgggcaccttaaagcagggaccatgcccaccgagtccaccatggtatcccagtgcctggaaccggcttggcttacaaatagccgtgtagcaagcgaagagtcacccaccctccccgagccggggcacagccgtgaggagagagcctcccttgcaggacagcgtgacatcacgtggaataacaagttctacatgcctactctggcacacactcctgacagataatagacagccggcagcactgtgctcaagtgcctggcccatcagccagcaggtgtgccaaggccggcagggtggctgcagcaggcggatgagtactttgcatgtgacacttgcaggggagggaaccttgggtagtgccctgtgtcagaacagggtctcacccttaaaaggcggagcaaagcctgtcttatcacacagtcctccatgtagtcacaatacataccagccagagtgatgtgtgtaatggaacgttacctgcaagaaacagggcacaaa

SEQ ID NO: 70025 - DNA, 608 bp, Homo sapiens
ggctatatgtggacacttggttcacatcgctcacgtaatcctgaccacccccattttccaggtcaggaaataggcatagggagatcagataacacgtccagggttatatggctggtaagtagcagagctgcgatttgaacccgggggcctggctccaagtgctgctcttctgctcttgagaggggccagcagggaagcagaagcaaagccaccgtgtgcttggtcataagagcaggaggggagcccacaggatgttgaaaggcacccgccctgtccccgtgctaagggcgatgaggaaatcccggaggcctgaccttggagggggcaggggacagggtccacatgacagccaaaataaacactgggcagtgccgagcctcagcgttgcctccaggagaaaggcgtgctggcgtgaggccacagtcggcaatgccgggcagctccctggacctcaggacccaggcacctgccgtgacccaggaaccttcacctggtggcaggtacctgaagaaataattgaccaatcttaaaaatgaaaacccatatggctatggttttttatttttttattttttttgagacggagtcttgctctgtcacccaggctg

SEQ ID NO: 70026 - DNA, 960 bp, Homo sapiens
cccaggacacagcttgcagtgagccaagatcgcaccactgcactccagcctgggcgacagagctccgtctcacaaaaaaaaaaagagacggcctcactctgagtcatgtgactgtggttgcctcacttcctttcctggcaggagctcaaccgcacgtgccgagccatgcagcagcgggtcctggagctcatccctcagatcgccaatgagcagctgacagaggagctgctcatcgtcaatgacaatctcaacaatgtgttcctgcgccatgaacggtagccccagcacctcccctggcctctggcctactgccccaaccctctcccttcccttcctccctgttctcctggtctcatgccatctgagccttctctcgtcctcctctcaaacacaaggcaggctcctaagggcctgtgccctcagctgtcttcttccaggatgtttatgagggcccctccttccagccgccctgtatctcctttccagggttagcgctgctgcctgtgcccaagtccagccctgggagatggtcacaggtcacagctgagagcacggccctgcaaccagactggcctggtgtgtcctcgcccactccaccacttcctggttctggggccttagacaagtgacttcactgctgcaagctacacaaaacatttctggctaacttaggcagaaaaagaatttgttaggataataatctttattaaatgggtagctttcagaatccagagaaaagtgaaactgatgtctcccaacagaacaagaaagatggatcccagggcagctcagatgtctcaggagcagaaattcctggaccatctccccagggtgctgccatcaataaatacatcagctcaaacacttgtccacaaacacctgtccaccttttttttttttttttttttgaggcacgatcttgctctgtcacccaggctggagtatagtggcatgatcaca

SEQ ID NO: 70027 - DNA, 504 bp, Homo sapiens
ttactgatttttcagcaagagtcagccctctccttgaaaagagaagaagagtccccagctgaacacctgttgtgtaccacacactgggtacacgaagctcctacacccctgatctcagctggccctggtaagccgggattattagtcccattttcctgataaagaaatggagattttgcagggtgaagaggtcacaatatgggttaagtacagagtccagcacccagctccgtctgatgccaaaggccaggggctttccaccacgcccccatgccaccttcccaggggatgccgcctcgccagaagtccagggcacattctggaatttcttcagagaggaccttggaccctcatagagatcctttctcacagctgcctgctggggagcccttgagaagcaaacacttcccagcattggacaggtgacacagtgggtccacagacactgtcacaggtggccctcatgatggtcaagagccaattttttgttttttgtgtttcttg

SEQ ID NO: 70028 - DNA, 1920 bp, Homo sapiens
gctgaggcagagaattgcttgaacccaggaggcagaggttgcagtgagccaagatcgtgccactgcactccagcctgggtgacagagcaagactccatctcaaaaaaaaaaaaaaaaaaaagttcccacggtgctgccgagcctgtgattggcagaggcattgtttattcgttcaaggttttttgttaagggacccggtgagtatcaactactaggcagttctcacttctgctcacttctgggctcacttaagcctaccagcagccctgaaggctgttaaccaccctttagagcttagagagtcgaagaggcaggggccaggtcctaaagaaaggcacactgtccccagagcctggggcgcgatgccacccgccccccccccccccgcccaggcgtacccccccttaccccgccccccacccgctcgccgcgcccagcccatctggcgccgctctgcccctgctgagtaatcctttcccgagccacgtggccgtgtttttcctgctgagtcacggtcccgaggtctattttcgctaagtcaccgccccgagatctgttttcgctgagtcacggtcccggtgtctgttttcgctgagtcacggtctagagatttgttttcctcagagttccagctgctccaggtttaatcccctggggcaaagtccggactgtccggctggagtctggagtcgggacatgcctcagccagcacgtcctcggcctcgtctggggcctgaatcctagggaagccatagcagctcctccacccttcctctcactcctcctctagcctcttgctactccccgcaccactgttttagggaacctctatctcccgacggcctgccacgggccaggcgctgtgctgggggcttcacactttaaatcgctgttgagcggggcgcgggggcgctgcaacctaaaggtgggagctactcaaatggaggggcatctgttaaaatggccggcctgtcattttcaaaaacttcaaggccgggcgcggtggctcacgcctgtaatcccagcactttgggaggccgaggcgggcggatcacgaggtcaggagatcgagatcatcttgtctaacacggtgaaacttcatctctactaaaaatagaaaaaattagccgggcgtggtggcgggcgcctgtaatcccagctactcaggaggctgaggcaggagaatggcatgaacccgggaggcggagcttgcagtgagccgaaatcgcgccactgcagtccggcctgggcgaaagagcaagactccgcctcaaaaaaaaaaaaaaaaaaaaacttcaaaggctgaggaacccaaagaggcaggacaagtgaatgcaatgcaacctcttgggctggaacctggactggtaaaacggctaaagaggaggttattggggcaataggggacatttgaatataggctttatattgaaggagttcaggatatgccacccaaaatgtgccactttggattaaggatcattattattattattattattattttgagacagggtctctgtcacccaagctgcagtgcagtggcacaatctcggctcactgcaacctctgcctcctaggttcaagcgattctcgtgcctcagcctcccaagtagctgcgattacaggtgtgtgccaccactccccattcattgattaaggattattttgagctggccaggcgtggtggcacatgcctgtaatcccagcacttggggaggccactgtggggggattgcttgagctcaggagttccagaccagcttgggcaacgtggtgaaaccttgtctctacaaaaaatacaaaatataaaaaatttgccaggcatggtggtgcatgtctataatcccagctacttgggaggctgaggcaggaggattgcttgagcccaggagattgaggttgcagaccactacactc

SEQ ID NO: 70029 - DNA, 6249 bp, Homo sapiens
tgtgtgtgtgtattgctttggcgagctcttttattaggaatgttcatcttttgtctgttatatgtgtggcaaacacttccttccagtctgttggtagggtttcaaccttatttatggggtgttttggcatcagaagggttcggtgttttgcacttcagcctatggatttttttctttttcttttttttttttttgagatggagtcttgctctttcacccaggctggaatgcagtggtgcaatctcagctcactgcaacctccacctcccgggttcaagcgattctcctgcctcagctcccccgagtagctgggattacgggcacctgccactacgcccggctaatttttgtatttttagtagagatggggtttcaccatgttggccaggctggtcttgaactcctgacctcaggtgatccacccacctcagctcccagagtgctaggattacaggcgtgagccaccacaattggcccagtctatggatttttaaaaaataacttgggcttgtcttccttgctgaagaaggctgttttccagcctgtcacacagcagttaggctgtagaccctcactggagcccctgccctgcagaatcgagcacatgttctttctgggtctgtgtggggtgtgggtgtggtcaggacaccgtctgtgaccttatttactggggacgtcccctgcttgaggagaatatccaggcaaggtctcctcactctccttagccaccatccagcttggccaagaggcctccccatgattcctcccacgccagggcctcgcctttgtttttcactgttaggggctggcgagtcactgacccgcccccctccctgctgcccaaaccacttctgtttcctgaaggcgccttgggaatgctgagtcgcgatttcctcatcccctcgtgcagctgcatttctgctgcgtcatgtttgggaggggggactcgcggaaacaaagggaaggcggattttgctagattttgctgagtcaccagtgcctcctcagcttctctttaggtgggaggtgaaagggcagctttaatggtaggcaggaggaagtgaaacttctagaaaacggcagaagcctcttgtttgtcttttctaagtctgtgcctttcccctgctgggtcccccagctcccaccctgtgaagtccacctcaatctgcccctgatttaatgttgcaatccaccgaggccttcttatgcttcacatctctctgacttctgcatctgcctcatctcttctgcctccagcaggagaaagttctctactttttttgcctggataattattgtatttttagtagagatgggggtttcaccatgttggtcaggctggtcttgaactcctgacctcaggtgatcagcccacctcagcctcccaaagtgctgggattataggtatgagccaccgtgcccagcctcatcctccatcttcaaagctagcagcatggcatctcccagtctctctctctgtcctctgctttctttgtcaccttctgtatgtgcaaccatccagcctccctcttataaggcccaagaggataatccaagataattccccatctcaacatccttgacttaatcacttctgcaagatccttttgctatgtaaggtagcaaaaaggtaacctattcacaggttctggtgattagaatgtggacacctttaaggggcttttatttggcccagcaggaggagagagaatagcatttggatcatcctgttgcttgactaaaaagaaggggaagtcaggaggctgaatcagcatgcgaaagggccacaaattcagccctgggacagcctagaggaccagaacaactctggcctggcctcttgcaccccagcaacccactgtgtggggggctgttctaacgaagtctggggctcccagagaacagttagaaaagaaagcaagcccagaccggcagccaggaaccctgggtcactggaggttctctttccaatggggggcatagcctggccaagtccctcctgctcttggggtccctgcttccctgtgttaaataaaaagggttcagatctcatgagttttaccctctagggtcgctgaatggacagactctggatctatacacgcaaactcatctcccctaaactcctggaccctctgtgagaagggttggagtgtggtggtcaggactgtggggactggcttcaaagtgctgtagtttgaatcctggctcttccatcattaactgtatgacttgggaaaatgacttatcctctttgtccctcagtgctcatgtgggcaaaatagagatgaaaatagcttgcaaggctgttgtcaggatgggctgcaatcacgcgcgtgaagtctctgcacatagtaaattctcaataaaggctggttagaatgacagtttggaattgtggcttggttccagcccattctatcagcccagcaatattacagcctaacaatattattattttttcccagaaagagaccttgaagcatctattcattcaggcatgcattcagtattaactgtgacctaccaggcactattccaggaactgggaatttacaaagcaaagtagtaggcaaggtctccacctttgtgctttacatgccactgttggggctcagaaagtgataccaggacaactggtgctttgacatgatgagaggccttaggagctgcctcagagtcaaggtccctgtaagcttgtcttgttcccccgacaagcacagggagagacgctctctggaatttccttatctgaccaagaacacttctttacaaaagaaatgcaattgtgttaagtctttttttcctttgagacagagtctcgctcttgtcacccaggctggagtgcagtggcactatcttggctcactgcaacctcctcctcctcccgggttcaagcgattctcctgcctcagcctcccaaagtgctgggattacaggtgtgagccaccgcgcccggccagtgttaagccctttttctagtaatctcatcaaatatccaggaaagatcaaccactggagagagaaagagactgggagtcatcaccagacccagacagatttacctgttcttctgaggacagtgccaagagattacctgggggactttatctgcctaggacaacctttgtccctgtgcggctccacctccaccttcccttaaagtcggcctttcacctccagggccattccttcttgctaatgatttactgtctttcaaaagaattgtctgcattccctatctcccttctcccctataaaaaaggctgggtagcctctgtactccactgggttacagggtcaccattcttccgtgattaccccattacaatacatttttgtatgtcttttctcctcttaacctgacttttgtcggttggttttcggggaaccttcagaggaagaaggggaatttttttcaaggccccttagctcacccttgggaggatgatcctttccaatacaatctcagaagtgcctctgggctgtagtggccctaggctgaattccaggaagttttttttttttttttttgtttttttttttttttgagggacagcgtcttgttctgttgcccaggttagaatacagtagcgtggtcacagctcactccagcctctacatcccaggctcaagtgaacctccagcctcagcctcccaagtagctgggaccacaggcatgtgccaccatgcccagctaatttattttatattttgtagagacagggtctccctatgttgcccaggccagtctcgaactcaaagcaatcttcccacctcgactgggctcaaagcgctcttcccacctcaacctcccaaagtactgggactacaggtgtgagctaccatgccaggcctgaaagccatcttaaaaaaaaaatcttagaatgagaatcacagtattgggaaaggactgtatgaatcatctggtccattcgttttgtcctctgggttcacccagtgaccctatttcccccgagttctaaggagtccacctcatgcagaattgattcaataggcgatcagcaagggccagctctgctctgggccctgagcaggcactgagtataagtcagacctgaatgtgcctggaagagtgtcccacgcattccagcagggaagcagtttgtatgacaggtgtcccagtccaggcggataccaggtgctgccagagtgtggaggaggcaggcggggacttagtctcctccctgggtttggacactggcatcctgctttatgtgtgacaccactgcacccctctgagcctcggtttccccatctgtaaaatagaagcgatctaccctcacaggtcagttgtagggatgaaccatgaaaatactagagtctctgttttttgacaggaactcaaaaaacagatcctaaatgtacatttaaagagggtgtgaggaggcaagcagtcagcagaggattccagcaggtgacattttagggagctggagacagcagagcctggggttgctaagttcctgatgttgcccaccaggctattgctctgagcagcgctgcctcccagctttctggaaccttctgggacgcctggggtgcatcaagtcccaaggggacagggagcagaagggggggctctggaaggagcaaaatcacacccagagcctgcagcttctcagatttccttaaaggttttgtgtgtgtgtgtgtgtgtgtgtgtgtgtgtatgtgtgtgtgtgtgtgtgtgtgtgtgtgttttctctaaaagtcctatggccagactttgtttcccaagggtcatatgactgctcctctccaccccacactggcccggggcgggctgggcgcgggcccctgcgggtgttgcaacgcccggccagaaagtgggcatcagctgttccgcctggcccacgtgacccgccgagcataaatgtgaccggccgcggctccggcagtcaacgcctgcctcctctcgagcgtcctcagcgcagccgccgcccgcggagccagcacgaacgagcccagcaccggccggatggagcgtccgcaacccgacaggcaagcgcggggcgcgggacgcgggacgggcgcctttctctcccaaccctgcttgcgtcctagccccaccccgggacactgccacacagcgacagagcccaggagccagaaacttgggctctggagtcaggaggtgcggggttctgatcctgcctgtgcccgtagggtagttggagggaggaacggtaatttacatgcctggcaccctggtatgcggttggtgaccaagatgggagtgtccctagagtatccagtctttgaggtagccaattttttttttaatcctactttcgaggtgtgtttggagttgctctctgctgaatctagatctctggggctctgccagcctgggggagcatgcttggttctcttggtggcatctgtccctcactagctacggaggacctgagccagacatcaccctggctgcggtgttccatgtctcacagatagcccagttcagggaggcgacatgcccaagagtgctcagttagctggtgtcagaactgggccttgaaccttggtctgcccacctccaggtctcactcattcccttctttcaataatttgttagtatttttttttttaactcctgggcttaagcatcctcccacctcagcctccagagtagctgggacttacagacatgtgccatttctcctgagactttgaccagctgtgttgtagaacagggaagcagggcaggagaaaagggaaaaatgacaattctgtggggaggcagggatacggacccatgacagaaatactcccagaaagactttttctttgactaaagcagactttctcaggctttttaaccctgacgccttcatgatgagcataacatgatagggggtcatgagatttgcatctggaactttaacaaaataactgaattaaatattgggtctaaaagccaatcaaagcaattacaaacttggagatgccggttcatggggctgctgcttcttcctgggttatgctgtacctcctcctcctctccactgcgaactacctgtaccaggatttcccccttggtttgggggactgtattatttagtgttttaatgactgaagagtgtttacaaagctgcgagagccaccatgcccagcctgaatttgttttttgttttttgtttttttgtttttttgcttttttgcttttctttttttgagatggagtgttgctctgttgcccaggctggagtgcagtggcgcgatctc

SEQ ID NO: 70030 - DNA, 1016 bp, Homo sapiens
tggtgaaactctgtctctactaaaaatacaaaaattaaccgggcatggtggcgcgtgcctgtaatcccagctaccaggaggctgaggcaggagaactgcttgaacttgggaaacggaggttgcagtgagctgaaattatgccactgcactccagcctgggtgataaagcgagaatccgtctcaaaaaaaaaaagtggtaaggacagattttaatcagtaatgattattgcaacagggaagagagttcagtatgaactgaactcagctttaatttgtatagaggtattttaaagggaggttgaccagcctgggcaatatggtaaaaccccatctctacaaatgaataaataaattcgccgggcatggtggtgaggttgaggtgggaggattgcacgagcctgggaggtcaaggctgcagtgagctgtgattgcaccaccgcactctagcattggcaacagagaccctgtctcaaaaaaataaataaaaaaaataaaggaagattgagggaggaaggggtgggcaagtgattagtagagtcagggaagtgaaatattacaaaaggttaagtcagtgtaaatgcagtgaggctagctgtgtctgccagttggcaatgatcaaagttagaatttttgcctcccacagagcctgggagacagaggtcacatcctcggttgttgcctggaataaacggtaaacatttaccagcagccttgagttttctcaggcaggcaccttagcgggggctggctagagtcattttagagatgttagcagctgttagaaactgttagtgtttgtttaagtctttttttcttttctttttttttttttttgagattaagtttcactcttgtcgcccagactggagtgtagtggcacgatctcggctcactgcaacctccgcctcccaggttcaagcgattctcctgcctcaggcttccaagtagctgggattacaagcgcctgccaccacgcccggctaagttttgtatttttagtagacacagggtttcac

SEQ ID NO: 70031 - DNA, 1401 bp, Homo sapiens
tctgaacttctagttttttctccctatggctatgaaaagggtcattttttttcataggactttaaaagaaggcttaagaaaagcacgcaggcctggccgggtagctcacgccagtaatcccagtgctttgggacgtcaaggcaggcgggtcgcttgagagtagagtttcgagacctgggcaagatggtgagactccgtctttatgaaatattttaagaaaatcacgtacacctgtggtccccgctacaagggaggctgaggcggaaggattgcttgagcccaagaggttgaggctacagtaagccgtgatccagccactgcactccatccccggcaacacaacgagaccatgcgtcaggaaaaaaaaaaaaaaaccaagaaaataaaaaagaaaccacctaaaggcgtcctccgcgcgcccgcccctccgccatctttgcgtccgccccgtcctgcgccgccacttccttcccagccagaagtttcgcgccaaattgttccgcacacaaaatggagcccggaaggaggcgaggtcatgcactttgcagccaatcatcttcggcagacagtccgggcggcggggctggagggctcagaacggtccaatcgctggccgcgaggctccggcgaaccaatgggagcgcagcggctgcggcgtccgaacaccgcctcttgtttttcccgcgaaactcggcggctgagcgtggaggttcttgtctcccctggtttgtgaagtgcggaaaaccagaggtgaggctagtgggagtgggactgggactgggagccagcaggcatctggatttccgggtgtagttggagtgggacaggagtttctcgggaactggggttggagtccgggagcgcggccgggggtccccctgctccggactcagggcagggacccaggcgtcggaggggaggaggtgccaggcgctgcccccagcctgttctggccgtttgttcccaccccaggcgcagtcatgtcgggattcgacgatcctggcattttctacagcgacagcttcgggggcgacgcccaggccgacgaggggcaggcccgcaaatcgcagctgcagaggcgcttcaaggagttcctgcggcagtaccgagtgggcaccgaccgcacgggcttcaccttcaaatacaggtgcggctcctgcggggccgggggctcgagttccagtgtggccgctcacacgcctctaccagcctgctagagtcctggacagtcagggcacagatgggcccagacgggggaaagagccggtcctgggtcacagggctcatcccggcagcctcacgccttggtataaggctttgtgtattttgttttactttattttattttattttattattaacgtatttgtttattattttgagacggagtctcgctctgtc

SEQ ID NO: 70032 - DNA, 773 bp, Homo sapiens
atgctagccagtctggtctggaactcctgacctcctgatccacctgcctcggcctcccaaagtcctgggattacaggcgtgagccactgtacccagccttttttttttttttcagtcgtatttccatgcaggacacagaaggaccagtggggactcttaccttgtctctagctttggtctttttaaaaaaaataaccctgaataatcaggagaatttttttgatgaatgagggcactcctctccagctgtcccaggggtgcgaggagaacagtgtccatgagggggcgccagagcaccaggcccggggctgcagcctcccgcacccacccggcctggcctgcagggccagctctccaggcgctcccagggacttcccggcctcctaccctgggaatctggaaactccctggctcagactcagcagcccagacgctgcctggaggatcctctggttctgggcattcaccactggctttgtttggacaaaggctctgctgcgtgacagatcctgggggatgcctgagttatcgttatcatgctccagcggaagtgggtatcctcgtcctgggttacacaccaggaaactgaggcacagaaatgcacggagccggggtccaaacccacggatgcccaacccccgaatctttgccagcagtctctgagaatcagtctggatctcagaatgattgtaataatcttggaggcttagaaggctagactcttagaaatattcagttcaaatatacacgtgtattattttttgtatgggtag

SEQ ID NO: 70033 - DNA, 1153 bp, Homo sapiens
tagcaagagttcagacagtgagggttgaatccaaaagcaaaagatttctgtaaggcagctccatggagcacagaagagagagcaaccaagacttcccagaggcagtgatgcttgattccagaaggaaagctaggagcctgctggcaatccagagatgagcagcccctcaggcacaggctccagcatgtgcaaagacctagggtacagagagcctggcaagctcagggaactacaagtcagtgtctttggctggagcataaaggaggggaggaagaatgccgggcaatgagggtcagagacgttaagtggcccattcaagggtcacacagcaaacttctgtttagttgggattagaacccaggctcctgactgaattggggcttgcttggatcatcgggctcagtgggtggggggaggggcagcaagaggcagaaatggtcagatgcaccgggggcagggtgtggctggttcagctgtgctcctgttgatctttggcctggtggggcacccctcctcccatgtcattgccagtctgccttcagggatgtttggtgaggccttgaatgccagatgaggtgccagcctgttccggctatctgccctctgtactgactggcacctgacccagtgccccagtccagctgagcttatgcagctggtgacccattgacctctgatgaagttcaaggctggcacagatgcccaggcctgccaaggcaagagactcagttagaggctgtgtagtctgggatggtgcattcagcaggaaagaatgagcctgtcatgagcatgtgttgaacttggtcaagccacaaaccgtctctttttttttttttttttgagacagagtctcactctgtcgcccaggctagagggcagtggcgcaatcttggctcactgcaagctccgcctccagggttcatgccattctgctgcctcagcctcccgagtagctgggactacaggcgcctgccattatgcccagctaattttttctatttttagtagagacagggtttcaccccgttagccagggtggtctcgatctcatgaccttgcgatctgcctgcctcggcctcccaaagtgctgggattacaggcgtgagccaccatgcccagccccatctctttgtctacaaaacaggaaggctgg

SEQ ID NO: 70034 - DNA, 1098 bp, Homo sapiens
gtgcttattttaactcttactttctatttatggcaagtgatactgatttcccatttaaggcagtgatataatgattctctaaaaaaacgtgtttaaggggtggggaaagtggatctgatattttaaaaaatatattaagtaataagtggtgtggagatatggcccagtgagaaggcccgatgtctggcctaggtcaagcccctcatttaaaggtggggagggagaatgcaggcaggagacgcaatgctcaaggcacctggtgtgtccccgtcggccgtggtctctgagactcgcatgcctcgaagacctctggctactaagcctaggtgactccccgcccctctgggcgacacgtgcatggcccatgtgccagtccgcagggtcccgtgggcaccgtgagctcgggagggaggcggcggctgggacaggcaggttggacacctgggagggcacccggggacttccgcgaaggaggagggcgctggaaccgtggcgcgctcgacctggccgggcgcaagccgctggagaccccggccgagtgggcaggcggccggaccccatgcgggtcacctgcggccaggccgggcgtgcgtgtgagcgcgtgcgcagacgtcagcctccgaggcccgggccgccttctgggcaaggtgcgcgcgcccagcggccccggccccacgcgcccggacacgcggaaccgcagaccgcggcgccccggaggccgcgaaagggatgggcggggccgggccgcgggacccgcctcccattggccgggcgccggggcgaggcggggcgccggggtggggcggggcgagcgggctctggggggcagacgctggcgctgggcggcgggaggcgcggctcgcggggggccgaaggagcaggtgggcgacgctcgcaggggcgcgggagggtgccgctgggaccgtcatcaggagcctggggttctgccacctttcggagggatcagcgacctcttcgccctgcgggtgacagtggggcatctgcctgcgagagggggaaggagggagaacccagggccacacacaaagttctcctcatctggggacaggaggaggtgaaggaggaggagccgggttg

SEQ ID NO: 70035 - DNA, 705 bp, Homo sapiens
ctggcccacactctgcccctgcccatgcctccctcctagcagatgatgagctattttccaagcatgtaggatgcactaaacccttcttgaggtgtcctcataaatttgagcctaacagccgcctgtgagataaggactgggaatttcatcatctacatttcttcagaagaggaaactgctgccagagaggtgaaatcacttgcccgaggccacagagccagccaggaaggagtgaagcttagcagtggcccctgagacctcagtcaccctggactggcgttccccttcctgggagtaagggatgagcacactgggtgagaaaatctcagcctccgccctctggaaaatgactcagttctggcccctggtcaggacatggggtaggtggccagacagccacaaggttgggctgtaagcctctagcgcccaggcagccccgctgccacccagagcaagtcacactcatacgctctcctcagttaaagtgcacaggctgagtgcggtgactcaagcctgtaaactcagcactgtgggaggccaaggcaggaggatcgcttgaggccaggagttcaggaccagcccaggcaacatagtgagacccaccccatctctactaaaaataaacaaatttagccaggcgtggtggcatgcacctctagtcccagctactcggaaggctgaggtaggaggattgcttgaacttgg

SEQ ID NO: 70036 - DNA, 1342 bp, Homo sapiens
agactggtctcaaactcctgacctcaggtgatccgcctgcctcggcctcccaaagtgctgggattacaggcatgagctactgtacctgaccttacttcttttaaaaccacagattggtttggggaaggcagacatttgaaagcctgttggggggccatgtactgagtggggtggggttcggagctgaaggagaggcagggcagagggagacaggatttccagggcttccctgcaggttgaacttggaggctggagagagtcatttaaccagagtgcccgtcatctgctgccaggagttgagtttctcgctgagtgaccgggcagatggtggcgccatttactaaggtggggtacccaggacgaggacgggccgggggtgggtggagaccagtttcctttgggacacgtagcatcgggtgttcaaggggcatgtgcctggcagttgtagggatacacagccatccccagggcagctcctttcttctgacccctgtggaggtgtgagctgtcctctggtgaggtggtgccagggagcggtcgccaggtttgtccacctccttcttggccagccggcaccagcgtgtatcgggctcccttcaccaggaaggggaggtgctctcctcggtctaccctgaaggctgcacaaggggcgtagagagggcatgggtgtggttacttctgggtggcaggacatgggaaaggagaccttactccttaggggaagctggggagctcaggcgcccgtctgggcagtctccaggccaggtcctctccttccttgttccctccccagcattctgcagccacacacattctctctccccaggcaccgcccatccctgtcccaacacctcccaccattcccttgaaaaacaatcaaaccccagctcccccaggaaggaggcgtcagagtcagctctgctccagggagggccccccagggagggggcaggagaagcagagagggaaaatgaaaccacggtcaccctgggctgcaattaggttttctctggtctctctcaaatcaaacacaacccacagcagagccatttcttccttaaaagcccatttgtggttcatgcctgtaatcccagcactttgggaggccgaggcgggtggatcacgaggtcaggagattgaaaccatcctggctaacacagtgaaaacccatctctactaaaaatacaaaaaaaaaaaaaaaaaaaattagccgggtgtggtggcgggtgcctgtagtctcagctacttgggaggctgaggcaggagaattgcttgaacctggaaggcggaggttgcagtgagccaagatcacaccactgcactccagcctgggcaagaaagc

SEQ ID NO: 70037 - DNA, 1188 bp, Homo sapiens
gcgcctgtaatcccagctactcgggaggctgaggcaggagaatcacctgaactcgggaggcggaggttgcagtgagccgaggtcacgccgctgtactccagcctgggcaacaagagtgaaactccatctcccaaaaaaaaaaaaaaaaaaagggtggaggatcttgtaaggggttttagggggtatgcctgaaagtggtgctcattgcttctgcccaaattccatcagccagatcacagccacaggcaccgcttacttggagggagttgtgggaatgaggtctctctgtgtgcccaggaggaaatgaaacagggtttggtgactgtacggcattgcctgcccagtcatggcccaagataataataataatctagtggaaagatgagaaagggaagctgggaataaaatatttatataaagaatgcaccctaatattccacacagcacataataggtgctcaatactttttcaagtgagtgctgtatcaccactgatcaaatacacaggcgctggggcaggttccaggggctggggagagggttgatggcacaatagaggcatgaaaggtggtaagagcaaagttagagaagcaggaatgcacgtggaatgttcagaaaacccagagaagaccagtttggctgggtcagaagttttgtgaagaggatgggtcacggaggcagttggaatgtaggcttggagggcatggggaatgattttgaacttgaagaatgttggcggctctcagcaggccctgaggagtggctgtggttgtggggtggggtgggggttcccaggcatcctggatgaatcatcagggtcagttaaaattagtcaccacgaccccgcaggggaagccaaaagacagttgtgtggcttatgtggtagctgggatttgcctcgctgggggatctttggccttcttagtttggagatgggggagcagaggagggagaggagaggaggaggaagaggggaggaggaggaggaagaggggagaaggaggaacaggggaggagggaaggaggcggaggggaaggagaagaggagggggggaggaggaggaggggaggaggaggggaggaggaggaggaggagaaggagtcccactccaccctgcccccatgatgtgcgagcactaagatggcctgggacagaactggatacgacacagtttggggagctcttct

SEQ ID NO: 70038 - DNA, 786 bp, Homo sapiens
tttgaatcatagcatctcagcaagaatcacagaatggtagattctaagggtcataggatcacagccaagaaaaggaccttgacttatccagggagatccccttgttttgcagatgtgaaaatggaggcttagagagggaggggccctggtgtttcaaggggagcctgccctgtcccacactcattcctgaaggctgaggctcctcctgctggaagacactcccttctggagcatcatgaggtcacaggggatccctggctagccagccagagcccagctgcccacacttgcaggggaaacagcatgtccatagccacagtgggagcagaactaggtctgctgctcctcagtggcctggtggactttcatccctggccacagcaaggcttcctggagccacagattcagatggcctgtggactttcatccttggccacagtgaggcttcctggagcatgtccagcagttccctatgtacagacacaaagcctctgggggagataacaccatcttcagcccagcaaagagggagtcccgatggtcgtggagggcaattgccagaggggcccattctctgtgatgcatgtggagtgatgggaagcccaagcctagagaggttataggaaatcctaacatggattcttctagctggagcagagtggctgctaagccagggtactcagggcacccagaggctcccaccttggaagaccagctgccaggaacatgccacttcacaaaacgctatcgggggtctctgggccacatcagaggtagccagccctt

SEQ ID NO: 70039 - DNA, 1024 bp, Homo sapiens
tgacctcaagcgatccacctgcctcagcctcccaaagtgctggcattacaggcgtgagccaccgcgcccggtccgagagtgtgttttaaatcacaagagactaaggggccttcaggcaagtttgtttcttttcagcaggtcttgggtcccttgagggaagggaagtggactctaggaaattaagcgactccctacttttgttcatctgagctatagggtggatgttttctgtccccttacataagcagcacttcctgcatttggctacagaacatttttctcacatggcatctcttggggcgattgtttcacaagagccctggtggtaaacactgcccccatccaatggccggtctggcccctgagactcccaggaccgagcagtgaccacaacatctgggtccgttgccagggaaaacaacaggcaggcctgggatggctcagcggccccagccaggcagccaagtcctcctcaaggtcaggctgtgtttagcgtgttccccaagtgtgggaggccaggagcaggggtgggttgtggaatccgggatgccacggttggaaaggcccctacaagacccaactcagcagcccttaacccctcattcctgctcgtagggcccagggacaggaggtggcctctatcacagcaaagccaggactggctaggtgggccgcaccttctgcaaagcaacagcctccaatgtggtctcagctaggggtggtgactggggacttctgggcatataaatacaaacaaaccacatggcttctgatcacaatttgacacaaatgctagagagacacagatctcagcccgtaacctcactgtgggctcattcttgtagacacagagcctaggactggttcttagctgtgtaatcacaaacaacccacaacttctagaagcctgggtttcctcttccttaaagtgggagacagagtatcacaatcctatatctccaatccttgaggccagatgcatgtcagagttcctgatttgggggatttttagaaaggtaatggg

SEQ ID NO: 70040 - DNA, 2363 bp, Homo sapiens
gagatcgtgccattgcactccagcctgggcaacagagcgagacttcatctcaaaaaacaataataataataataataaaataaagtttccattttcagaggattctgcattcagagttattagccctttaatgctgtgcacctcatagggttgttacccacatcagcgtcacgtaagatgctgtggaggaaagcagtttcagaacaatcagtgatgacagctactgtgaatccactattcaacaggcgccccatcgcttgctcatgggctcctcaccatagctctaagccacaggagctattttcataccccatataggtccatcctataacacagccaggacagagacgagagactcaggcctcctgacttggattctgctctttcacctccttgttcatccaattagagaaactggcaaaaaggaaactgaaagtgacagctggagcccatgatttcctggaagagccctagagctttgctttttctctcctgcagcacttaaccgaaaccagttttgcaatcaattcctgttcaaaggccaccctactcttcctatccgtctttctccagcccagacactcacagccccctgccagaccaggggacctcggagaggcaaggacagaggttcaggatcttcctctccctcgggacccaaggccacaaaggagagctccgtggagagaaggtgagacggcgggcagaagtcgggggaggagggggctgccgctctggtccctgaaggacagagcccccaaggggttggctttaggcacctgactcagggaaaagagctgctgtgaaagcagcggggttcaaatgccagccagagcttgaggagagtctgaggattaacttctcctgtgttaatcctggtaggtttccctcccttacagccatttcagggttaaattgaaacatgctaaagcatgcgatgtgactagccaagttgcatttgtccctccactgctggggatccgagggcttaggcagaggggacctggcccttagaaagcagatgattacatcagccacaggcgtttccctagaaattcagtagaggagtggtttaggggtgtcatctcacaagaaaaaaggtgctgggtgagttgtctagaaactgcaaagccaacctacagagttttctagattgtagatttatgtgaagttgtttggggaagagggtgagggagtttgtgataaatattagggcgactaggccaggcgcagtggctcatgcctgtaatcccagcattttgggaggctaaggcaagcggattgcttgagcccaagagtttgagaccagcatgggcaacatagtgagaccccgtctctacaaaaaatcaaaaaatagctgggcgtgatggtgcacacctgtagtcccagctacttgggagggtgctgaggtggaaggatcacttgaacccaggaagtcaagaatgcagtgagcagtgatcgcaccactgcactccagcctgggcaacagagtgagacccggtctcaaaaaaaaaaaaaaaaatctagggaggttatcttgaagctgtgttttcaaagtaagcagatttttcttacttagattgtgtatctgcagaagttggttttgtgggggaaggcaggtaaggaaagactgtcataaatatcctgtaagctttcaaatgaaagtaagttctcaaatcctcttccaataaacctctcacaagcaaatcctctcgcaaccaccaagagcaggtcagaggggatggaatgggacctgcttagatgagtttcctgctgttacctttgccctgcatcccataggactaatgtaaaaaaatgagagaggtattggcggacgctggtaaaaaatggggttccagaccagagtctcttacccccagcaaccttgtcatgttcaaccaggtgatccctggttgtgggggctgtcctctgcatcgtagggtgcttggcagcatccctggcctctgccctctacataccaacagcagtaccctctccagctgagaccatcaaaaatgtttccagatattagcagtgtccctgaggagcaaacacgccctgtttgggaccaactactccagactctgcgtggctggaattgcacaggctttcctgcttactgtgtgacactggcctccctatgtctcagtttgcacctctgtaaaatgggcatcatcttagcaccgatctcactgggtcactgtgtaaagcaggtagatgtatgtctggtgaaagtaaactcttaaaggtgccaagccccctaaaccaaacctagcttcacataccaaagaggggagaaggtttttatctttgaagcattcattctttttcatagactaccccaaagaaataaccaaacatgt

SEQ ID NO: 70041 - DNA, 501 bp, Homo sapiens
ctctgtaaaaggagaaaaaaaaacttccccagccccagcaaccaatacctaaaagatttgtaagcagaaattttcattcctgtaatttattcattctctcagctgcacctgtttgttaaggccacaggggctgtcatcaactaagagctattccggtaaagcaaacaaacaaacaaacaaaaaaaccctggctctattttcagcagctacccagctctgtgggtgccaagtccatgaccccgcatgacttttgtaacccaaagccaaaggccggaatttaggctcaggcaacacaatctctgggtgttattttgccccttaaattgcactctttgtacaacgtttctggccccatgcaataacccagaaatagacacaagaattaggcagatggagatagaaatagcgccttaattactgatgaagctgttagagaatgaggttccttctctccgagccatgtgggcttatgaatatttcaccccaccactggacagatta

SEQ ID NO: 70042 - DNA, 522 bp, Homo sapiens
ttttgtctatatacttaaatgcctataaatgtgtatatatatacatatatatgtacacacacacacatatatatatattcgttttaattgtagtgaaatatatataacctgaaattttctatttcaagcattgttaagggtacaggtcagtggcattaggtatattcacattgttgtgcagccatggccaccaacatccacagaactcttgtcctcttgcaaaactgaaactttgccccaagtaaacaataactcctcattcccctcccccagcccctggcaaccacgactctgctccctagcttcatgaatttgactaccctaagaatcccatataaggggaatcctacggcgtgtgtccttttgtgagtggcttatttcacctagcagaatgtctttaaggttcatccatgctgtagcatgggtcagaacttccttctggccaggcgcagtggctcacgcctgtaatcccaacactttgggaggccaacgtggatggattacctgaggtcagaagttcaa

SEQ ID NO: 70043 - DNA, 1232 bp, Homo sapiens
tgcccccattccctagaactgtgaaagcccgcatcccattccccgctcctctaactaaaatatttatatacatacaacaaaaattgtcttaacagcaacaaaccaaactttggcttggggtggggggacccttaaaaatggccagtggactgggcagttggtgtccccttattctctgtcttcctccccagagtcagtaataattgcatcgaggcctctagcttccttgacatcgcccctagtttcaggcacagcctctctcccagttacgaggcgagacaggattctgaagggggaaaggatatgtattctacacaacaggtcaacgccctctcagatatatcactctgcttacaaagaatgcttgatgctgtcataggtcagtcattttaattcagggacatgagtcagttatcagtcaagaacatgtgtggaggcaggagttaaaaacaaacccaaaacaaacccataaccagaagctccatgtctctgaattactccctttagcagctgtcccttgggtgaaaggtcaccctagtaccaatgtgactagaccagggagccaaaaagaccgtgcttttctatttcctaatgccttcatttgggaaatgctgtaggacacttgcttttatcagttctatctaacagctagaagagaaacactccctcctaccttgataacatagaaaattacagccagatggcaacggcagtgactcactgcgcgactctttctggtgatatagaagacccttgccatcgcagaccctccttccaatatgggagggcagcaatctcagggcctctgcattttatgtcctgtagtgttaatgtgtacaaagtggtccgggtgctcagcggggtgtttttggaggacagtgagaagctcagcgggatagccacaggctcaagactgtggatagagaagtgactcataaaggctctggaagatgaaaattcctatggctttggagcaagtacaaagtgcctctgcctgcccttccatgtcctcatcaccaaaacttccagggactactgacctaggacctggtactctatctttccccagcagattctttattctattttttaaactttgtactttctgaggcaagaaaaaagtaagaaataccagatcttctaatattccttttcccttcctcaccctctttaatggctgtcaacaatttgtacttctaatcctcaagacatctgggggaaatctggtcact

SEQ ID NO: 70044 - DNA, 546 bp, Homo sapiens
cagtacaatcttgagctcttataaacagacaattaataaaataaatttttaaaaaaccaggcaatacaatataaatccttgcttagaataccaataaatgacacaagctggtatatgtaaatttaagggcagttacaggcttggccaacaagaatattgtaaacttgcctccaaatcacttgtcaacacacacacacacacacacacacacacacacacacccctcttctgaattactcagagggaaaagccagtccggtctttcccttgaggctgagttttgaaatctcacagcaatgaatatttaaacaggaaaataaatatttcagaacaaagtcattcaaacctatagtctattaggtgaaaagcaacaaaccctgtaatagtcttaatatttccaacctcttaaaagctctttcctctatttctccttaaacaagtatttagaacctcaaacattcatgaatcatgtcttccactggcaacaacagacagcaagaactactctggttcagctacctgcttctttggaaatggaaggccctt

SEQ ID NO: 70045 - DNA, 1199 bp, Homo sapiens
caggttccaaataaaacactggcaaagtagtagagtgtcttctgaattacaaaatatttaattatgctttataaattttgttgggtattctgttgtagtctacctctttaaaatagaaaattcacatgatatacatatagtaacagagaaaaattttccctatccctttcccagaacaaaacacattttgtctacaaccatggttacatggtggcttatatattctttaatcatttaacaagtaaagtccctaagtcaaccagggactgaatcataaacgtcttcatcatagcttcctcaccaaatgaagtgatgatgagcatataggaagtgccctttagaaaatgcctggtaattgaattaaccaggtaattgaatacctgcttctgcagtataagtctataaaaaaaagataggaaccattctctcaatagctttaccaactctgccagggaccttaccacaatataaataatcattctattaagatacatataaggctatatgtgggagtccacattatgtactatgggaaattaaaagaaaaatgagccattgctctcacctaggctatctaaataacattttttttggtttttaaagagttctgctttattttaacttaacctcaacctaatgaactctccaagcacctgccagaatgatctttctaaaataaaacctaaatctgatagttaatttatcttcttcttaaaatcctagactgccaatgtttacagtctcaagtccaaatacctttgcatggaagtcatgccccttgcacacttcatctattcagcttcaactcttgccatcaaatatttattgagtatctatcattcatcagatattctgttctagctgctgatgaaacaacgatgattaaaaagacaaagtccctgcccttatggagtttacattctagtaggaagagacaaataataaattggcaagtaaaacaataaacagatggtatgctacagagaaaaaataagaggagggtatcggggtattgggctggagagacagagaatttctattttctaaggctggtctagcaaggtaacactgatcataattttttagaaactaaggcaacaagctatacgtgtatctggatggaagaagactccagacaaagggaacacaaatgcaaagtcccacaggcaaaaatacaagcagctcattctaagaactag

SEQ ID NO: 70046 - DNA, 680 bp, Homo sapiens
ggacgagactccatctcaaaaaaaaaaaccctaaatatgtgctgtaagtcacagtcctaatgccatctacaaacacacccagcactatatgctaaacattattttaaatccttacaaacagaaaagatttgcaagggtctaactactctcagaaacaaaagaaaacatcaagtatttaccagttagaatgcctaatttttcatctccctccttcttcatgaatgcaatagtagccaagatcagaatgcagtctaaagaggaaaataattcccgttaccccactgatctctagcaaatggatcaataaggcaggccatggactctgatccttcaatcaggaatggcaatgaaatgtaaaccagtgattacaacattgaatcctttatcacaatgaggccagcctggagaagaaatgggagtcctatgttagaagtagtcatcagaaatgctattataaacagactgttattactgaacaggaaaacctatctcaacttaagaaaggtggcctgcggaagacagaactagggatacctgaaaccagctaacaaaagaaccaaaaacaagccatccatattttaatagttgtttagtaatgaaaatgtttgtagttttcactccacatttcctgtgaaagtcaagtcaatgctaaaccaacagggcatactttaaaaaagcat

SEQ ID NO: 70047 - DNA, 2493 bp, Homo sapiens
gaaatacagaaagaaaaggatggcaggagatgagactagagagacagccaggttcctgatcatgcagggtcacaggattttattcagagactgaaggggagcaactgtaaggtataagcacaggaatgacaaaatcagacttgcattttaaatgattcactctggcaatgacctctaatgaattagtttcctgaatttaatcattctaatagtaatagagaaacatttaagagtctggggaatagacacaatacattgtgatggcagaatgcagcatttctcactgcctagaagaggttgaacactggagcccactaagaaaggtgctacaatcaaaagagcaaagtatttactgcaggggagccttgtatttgtgcctggcaaatttcacatacaaaatgttgggaggaaatgttcaaaaaagatttgacagtggtttggaaatgttgaaaaaaaagagtgaggaattatgacttcggaagggaacatgtgggataccaataatgtcagatcccggagaggaatggtataccagaaggagaccagggtgggtaagggggggctgtatcacctagtatgactggttcccagaaactatctgtctaccataaacagatgtccaagaaacaacccctaggtaaggaattacatgatgaaaagttcaaatttgagagagataaaattgtttacatatggcaatctgtgtagatcagagtttggaatttctcaggggagaacagaaaactggaggaacaaaaccaggaatttgagcttatgccttatcactgagaggaatgaggaatgtcattactgttcaatatgaagatgtctcctgtagcaatacaaatttaagtaataggttgtcaaatattaagcttacctagactcaattgcaaagctaaggagaaagataaaggaaaaaatagagaagggggccaaaaaagaaagagaaaagtgtgtgtgattagggggtgactaagacggaaaaaacaatttaatgagtcaagattgctcggatttcatcatagcttcatttatgaaattctgtttatcttttcaagaaagctaagtaatttttagaaaagcaatacttttcaagagacaatcttggcctcagcgaagaaatgattataactgaagatatggagcaatgtagaagaattcagaaagaaaccaaatctctggaaaaagtgaggcttttttttttcattgtaaaggaacataaattcagtctccaacccacaatccccgcctatcctccaactccccaaatcctgcaaagcccatagaaagtggaaagtgtgccaaaacaaacagtgtggctgcagctccgtggatgaagggtgggataaggttcgagtggcaagggagcatgactggcaggcaaccgaatggaatcactttaaagcagtgccacaaaatggagactaaatgctgagaggacctccagaattcaaagaaaatgggatatgcttagcaaaatcacagaatagattctctactccaactcctttcaaaaaccagacaaacaaaaacaggaaaagagaaaatgaaacaaagcaaaacatacctgctctcttatctgtctttaattaaagcataaaataccctccctcttctcttctcccaaccacccaggaacagaagagcgaactggcagcagctcaggtgaaagacttcagccttccagctacaaagaggggagatagcagacaatggaactggtgattcattacaaaagaatacactccagagcggcctgctgccacatggactcactgcactatttaaaggaacagcaaccccctttccaacctcccttattcctaacaccttccctcctcttggtcctgatggaaaacagattttgaagaaaatgccagcaaagcactgagctgtccaagaaagggagggctttgtgttccacagaaactggcagtcttataccatagtagagtacaaaaattttctttcacatccatactgtaaaatcttttcctctctgcctagtacactttccctttcaacaatagatagtataactgaatttgagtttggctaaacatttattttttactaattagtgttgaagtcatttgcaattttgtttttcgaattttacacatagtacaagaatgatttatctttccttcatattccatattgctattttcataaatatgagatgcaataatctggtctatatgcccaaaaaataagagatctcagtgaaatactcctacaacatacacatgaacagccgataaaattaacgttttaagtatcacataagcatgtctatcggctatattagaattttgtgattaaattgccatttgctttttagcagagcactgattacttactataaatgacagagtagtttgataattaaaacaaaaacaggccctataaaagtagagcatatgtaataataaagcgcatacactgtgcaaatactgacaaggatctaatatggtatgatgaaaaagt

SEQ ID NO: 70048 - DNA, 754 bp, Homo sapiens
aaatgagattaattcaacttgcttcctttcataactcctcttccaaacaaatcaaaagacagaacagcccatccttcaggtcaacagggctgatcaatcccacccacaaggctgcaaagagcctgcacagatgactagtttacagggaggcgaaaactacttaatgcacattagtgtgtcagaaaagttctgagctcttacaaatactacaaaaaaaatcaatagagaagagaaaataatatttcaaggtcatatttaaacatgaagggagaagcacgaaaagcagcccctccgaacatacacacatacatatacatcttctgtgaacaagctccatctctgcaaacgcagttaacatttgctttctgataatttataaatttagcctgtgttagccaagtaggttcctgcaattccagacatctgggctgaagggcaaagggcaaagggaaactttcaaaaagctggttagtagccaagagcatcacatctagtaggctcccttagcaacacacaacagctgtttgctcaagagacatactgccatctttgcaacggactgtaagatgttcttgtcttaacaactaaaaattgcaggcggcttgggggagcagtttctctattatttcccctgacatttctctaaaagttatcacatttcataatttacaaacttctccagtcccagaaagtttctctccatcccaaactacaatgctactattgacggtaaattacagtaatagaaggtact

SEQ ID NO: 70049 - DNA, 1833 bp, Homo sapiens
caggtatgaagtgctctttcacatcaaaagtatttcaggaatacatgctcactggatactgaattaaattagaagctaatactgcacatccacccaaaaggccaaccttacaacatgggataattcaccccagcacattgagggaattggtcttccacttaaagcagtcagcaaataacaattattaacactgcatttagaatattctggttccagcatgggagaaaacatgagaatgcagacacagatcagacaaatgaagagatggacaagagaatccactgcaagaagttctgtgcctgtctggtaaattcatctggggcagaggggcagattctgttgtgtcacagaacacttgctttgctctgggtgccctctgttgacaaaaactgacatagccacttccttccctcccttttctcctcccaccctagggccaagagtcccactagtgtgactcagacttgaggcaaggtttccagttagaaaattttcctaagcccatatgtaggcaagacagacctttccttcctccagctttcctaagtccccttctctgtgtgcttgtatctgcagcttatctccaaacaggttaattgtttcaggaccatggaacaaaaagtgaacagcatttagcataatgatatgtgaaatttaaatcacaattgcatttcattttagaaatggctagtattcacacagagggaataaactgagtttgtaaatagtgtcaaatacaatgtgaaactctgttggtattaagaatactgataaggccgggcatggtggctcatgcctgtaatcccagcactttgggaggccatcgcgggcagatcacgaggtcaggagttcgaggccagcctgaccaacatagtgaaaccccatctctactaaaaatacaaaaattagccgggcatggtggctaattttccagctagtcagaaggctgaggcagaagaattgcttgaacctgggaggcagaggttgcagtcagccaagattgcgccactgcactccagactgggtgacagagctagactccatttcaaaaaaaaaaaaaactagacatgtctaaatcaggactttggtctatgggctacttgtttttgtagaacccacacacagactaccagctaagatagcttttacatcttgtaatgattgaaagaaaaaatcaaaagaaaaatgacatttcatgacatataaaaattatatgaaattaaaatttcggtacccacaaataaagttttactagaatagagccacaatcttttgtttactataatctaagcctgcttccctgctaccgtgccagagttcctgagtagctctaacagagaccatatggcccagatgctctcagatgctttacagaaagtttgccccctcctgttttaaactattgataaatgtgacacctgaaccttcagtcaggtatgaagtgctgggtttgaagtcctatggctctgtcttagcaatgacttcccccaacatttagtgtgagtcctgcacgtggtgaggggtcagcctacactgcctaacacactccccttgcatccacagaagctgaaggtactgtgatagatttctggcatgttttttggctaatacttatcagcaatcctataaaagcatcccatcttacaaatgaggaagtaagcctaagggaagttaagtatcagtccaaactggaatttgaactcaggtctgtctgacaccagagttctttgatcattcctcactggttttcaaactgtcttccagtcagcagagccttatgggggaaagggctccaggcctttcatatcttttttttcttttttctttttcctt

SEQ ID NO: 70050 - DNA, 490 bp, Homo sapiens
tatataaaacacaattttatgtgcatatcactgtattgtagcctacaatatgtggtacgtaaaaatcacattttgtccatccattcatctgtcaatggacacttgggttgcctccaccttttaactattgtgaataaagctgctatgaatatgggtgtacagatatctattcaagtccctgctttcaatgcttttgggtaaatattcagaagcagaactgctggatcactggtaattctttggtgtttgcacagtgacaatatttaactttttaagggactgccatactgttttccacagcactgaaccattttaaatttccaccggcaaagcacaagagtttcaatctctccgtattcttacttacacttgttattgtgtgtgtattttcatcctaatgagtgtgaagtgttatctcattgttttgatttatatttcctttacaacttagtgatgttgagcatcttttcatgtccttttcatcttttca

SEQ ID NO: 70051 - DNA, 2861 bp, Homo sapiens
ttctcacaatccctctgcctgacagagttctaatggaaaataaaagcaggcaaacaaaacaaaagaattcaaaaataaacaccaagagggtcactttacctaaatcaacagaagtaacagggtaaactctgcaaaggagaccaagaagcatacaacaaacatgctaggcttaagtacagctctgtccctaacacaggaagtcaggcagaggcttgaaaagcagggagcagagcacaggaagtcttttagcactgcagagatttccaagagtggtgtaatggagacagcacaggaataggaattagaagaccaggcttctagttctagttttactattagctaactgggtggccttacccaagtcaccatcttctctggacttctgattccccatctataaaataaggtggttaaaacaagctgggacttgaatctcctccaaaaaaaacaaagatgaaaactattgactctcctccaccaaaaagtgcacatcacctactatgagtaagaatcttccaagtcttcccaggttaagaacccctggaaaagatgatgtctagtcctcctagcatccctctaacatcctatgactccgagagaattaggcacaagtctgcacaactgttggtaggtgagactcatcatgtcatagcagtattttctgggcaaagaccaaatcgtaaaacctccaaaggtttcaaggtcttcttcaaaactatgaagtcagctgacatcaatacctttcccattccctacccaaattaaccacgtttatctttcaatccagaattgagaatccagtcttctaatagccctataaaaaaattttttttatagcccgggacattaaagagctattttgtgtcctggtgatgtagaatgcaattggcaaagaacaggagggacatgtctagtgtctcccttcagactcattagtatgctccacaaagtaaatgagactgagcaccaccgtgtccccataacattaccaaactccttgtacttctcacactctgtgtgatttaacccacaatctcagccacatcccctcggggctctctcgaggagttttcttttcactcctctcattgaaatgccacttctcttccccatcccagcgtgtgcccagggctgccaaaaggtactccctcttctcgggaggtttcccaccagatctccttttcctcgactcagtccagagaagccaggatttcccggcttccactccaccccaaggcactaaggaaggatttgaaaaaatggaatccatctcaaccttgttcgatttccccccaaaacctatccactcgtcgtgcctcctggcccctcaggaatcaggaccctctcgggcacaccaggttcagtcctgcaaccttcgttcctagcccgagctcgccccaccttccaaccaggccccgaatggccccccatcccacctccaacccaggactcccggaggccctccctctctccaagccggggagcccggtgtcgaccctcacgcccacccccgcaataactgggcgccccgtcccgcgcggtcacctgcatcccgccgccaccgtcggccgccgcctcctcagtgcgcggccgcttgctcaggccgggatcggctccgtctcctcccgctccgggcaccggcagctccagctccgactcccgcttcatgccccgggcggcggcgccgggcccgagctgaggcggctgatgcggctgggcgccctccgccatccgcccgcgcccccctcgcctccgggagccgggcgacccgcgacaggccacctccccctgggcctcggccccgactgtcgcgacaggcgggcgcgcgcctgcccccgcccccgcgtgcgtgcgtgcgtgcgcgcgagcggactccgcgcccctccgcgcctcgcggccgccgctccttgcctgaccgcttgctccccgcccgcccgcccgccgggttgtcggcgcggggccactggcgggtcgtgatgagcactcgctcgcgcccccgcacgcacacgcgaaacccggcccggcccgccgcgccgccccgcctctcgcactcccggagctcgcccaccggccgcgctggctcacactctccctcacagcacgccggccgagggaggaagggggcggtccgggctcccgaggcgtggggagggctgtttattttggggggaggaggggcgcgaggcaggaacgagctgactggccgggatcctccgacccgccactgtggcagcaccgggaaggcggggagagagaaagagggagggagggagggaccgggatgtagaactccagcccgcgcgggaggctacggcgaggggggcggtggcggcccgcggggggggcggggccaggccccctcggcaatctccgtagtctcctcgctggctgcccgagggaggccgggaagcgatcggggaagctcgggaatctccggcacgggcctgggattgtcctggaggcacagcgcggctggagtgcggggcagcgcggggggggcggggtctgtctcctttctgggcggggccgtatcctggagcaggcggggcttgagagacccgaaggccagggagtggctcctgcttgcggtactagttgtacagagttaagtcctgagtttactcgcctgagcaccttggttcccggagagggaatgggcactctgtgagaggcaggctatttgcctgcttcccctcccgcagaagaaaaaatgtctcaaattggaaggtcgaggaatgaagccacccctctatggttcaccccagttctgagagcttttactctaatataactcacattcctaatgaagttagtaataatacccgatgtttgtaagagctttagagtttgcacaatgcatc

SEQ ID NO: 70052 - DNA, 864 bp, Homo sapiens
gctgactgcaacctctgcctcctgggttcaagcgattctcctgcctcagcctccccagtagctgggactacaggtgtgcgccaccaactaatttttgtatttttagtagagatggggtttcaccatgttggccaggctggtctcgaactcctgacttcaggtgatccgcctgcctcggcctcccaaagtgctgagattacaggagttagctgccgcgcctggccgactgaaggcatttttgattgttacagtggggaggtgctgctggcatctagtgtgtagaagccaggaatgttgcttgacatcctatcatgcacaggacggtccccccaggagagttatccaaccccaaatgtcaatagtgcggaggttgagaaacgctgggttagatgatttccaaggtcatttccaaccagtgtgtgatttggcctttgaacctgggtttaacctggctggggctggaacagtacaacagtaaagatccctgcttcagagtcagaccaacccagatgagaacgcaggcttcccacctcctgcccacgtaatctgggaccagtggtgactaagaacttccatataaaaggtgtttggggattgcagactggttggaagggaagtcgggaggacttgccttgaaggtgagttgttgtattgagcatattgtttgtattacttaggctgtgttataaatcagtaaaaatagcagagttttagctctgccacctgcaagtcatgatgccttgtgacagctacttaccccctctgtgtctcagtttcttcatctgcaaattaggataacaataataccttcctgaaaagattattgtaagaatttaatgttatcacgtttagaactttgaacgg

SEQ ID NO: 70053 - DNA, 1877 bp, Homo sapiens
agtataaaggggttggaccgtgatctctaagatgcttccagttctatgggtctgtgagcttgagattctactacttagaatattcattgattattgacttaattagttagctaattcatttcttcaacacatatttattagctattcactacatgctaggttctgtgctaggcacttcccatatattttctttaatcctgagaagtaggaattatgatgcttatcttacagatgaggaatctgaggcttatagaacttaagaatttatccagggtccagttattagcaggaacaagattcgagtccctgtctcaggtctgcttttttccaaaactcaagctccttccctgaccctcgcctgcttctcttccagcttgcggggagcttttggggccctacgtgcgtgaagttccaatgaacccacggagaggcctgtaggggcaggggacagggggtgcctcttcacttctgaggcaggatttcagagtctgagagcaccagtttggtccagaaaccctggctgggacgttagtaaaggggcaagaattcacaaaccctcacgaggtgtcactttttgtcctgatcctctcctttccctccagcctgctgtggccagcgtcaaccactgcgacatataacatgccacatcaccagacaggccaggctgggatcccagataatttgacagcaggggattttcaccatcggactgctttccagtcaggcagcactgaggctaattaaagctccctctggggcatcagggagaagggaggagacaggcacgaccaaatctaaagacatactcgtccgggaatcaagcgagggaggcggaggtagaagcctggctcggaggagctcacagcgggtcctgcaggcagaacgcggtcacgtgactgatgtccctccggctggcagctagcaataccccggattgcaaactctcgaggtctccgcccatttcatggcaggaaatcagcgttttccaagaacgcccagtggcgcgggcacgggcctgagtcccgccgcccactgctctcgagaggccggagcagcagctccgtggcgccccctggaggccgcccctgctggcgccgtcccccgggtgtcaataggccatggcgcgcctccctctcggttgagagctgtgggagcccaggacgtgcctattaaaggtatcttttgaagtgagagggacaagaaaacgccttctctttatgtgactctctgttccccagcaaagttgccagggtccccaacaatcgtagtttctccttcacgggaggttcccctgacgtcctctagagggcgcgcgcgcacggccagggcgatttcggggtccgcagcccacgtgctgcgcggtctcttctccaggccaccccgcttgtctagctatgcgctgggggcagggaaagatctccctgtaagatctcccttacatgtggacatctgagagctgagatctcgatgaccccggaagacccttacacccggagtggagcggaagcaggatgagagaatattgactgagccctgccagccactgttctaagcactttttccctgttcctgccgatttgctcctcacaacaaccataggaagtggagactatgattatccccgttgcacagtaaggaaactgaggcaaaaggcggttaggtaacttggcgatgtctcccggctagggatagcagaatgggatagaaacgcaggccacgcggtctggagcggtggctcacgcctttaatcccagtacttagggaggccgaggcgggcgggttacctggggtcaggagttcgagaccagcctggccaacatggtgaaaccctatctctactaaaaatacaaaaattagtcggggtgggcacctgtaat

SEQ ID NO: 70054 - DNA, 1328 bp, Homo sapiens
ttccattcaaaactcttttgtccagaactggttacatattcccacccaaccataaggagaccaggaagaataatcccactgtgcatctggaaaggggaaaagccagacaaatgtggccaacagccccagtgactaccaccacagtgcttttgaaaaccactgcccagagccagaaggatggaggatcagcatggcggtaggaggaagggagaagccagaggggaatgaggaggagccggggtgcctggtatggagggccatccatccttggtcaatgtgcagggctggggccagaggaaggctgggcgcctttctcatctggacccagacccagacagaccccggggccattccgttctgcaggcaaacaagccagtcccgctagaatgtggcagtcacaggctttcaacatggaaggtggagctgcctggacgctgtgttttttttctgtttgtttttttgagacggagtcttgctctgtcacccaggctggagtgcagtggcatgatctgggctgattgcgcctcggcaaaatctcggctgacttgcctcccgggttcaagcgattctcctgcttcagcctcccgagtagttgagattacaggcgcgcaccaccacgcccggctaatttctgtatttttagtacagacggggtttcatcatgttggccacgctggtcctgacctcaagcgatccgcccgcccaggcctcccaaagtgctgggattacaggaataagccaccgcgcccggccagacgctgtgttttcctggcactccacttcatgagcaaaactgtcacagagtagtatttccctggctccacccctccggcgctgctggattcctgaacctattcacttcttctgaagtgctctcaacttggcctccctggctccttcctggtgcagacatttactcttcctgctccggctttgtgcctctgtaaaactgctgacgtcaccagcagcggctccgaccgcctgtcctccaaggtcccgggctgcggctgcgcagcgccgacagcacgatgcgtgtgccgacagcgccacctcctggctctgccgaggctgttggcaacacgcagggctcgcagtgcgcccgcttttctactgcagccctcaaaattcagcacgaggcttggctaggggagcttgagtggctgacactgtggtctggttagtttccattctgacccatgctagccgtctttcagattctagaactcagttcttctccggacctccctcccagccacaagtctttgaatatgcggcctgcagctgggctcccctcatccccgctcttctccccaaccttcttcatcatc

SEQ ID NO: 70055 - DNA, 694 bp, Homo sapiens
atcgtgcaataacagttatcagtgagttacgtaagtctttgtagtgaattatcaaacctgagtgggggcttaagaaacaccttcaaatctgcaactggtgtcagaaggaagggtgccttcagacattgcattttgactaactctgagtccttaagctatcaaataaaacctcagactggaagagatcaccttgcctggcatgttctctcttccaatgccacatgccctttgatcttctgactgaaggccactgggtccagccactgccccctttgactgaaaagtgaaaggcctggctattagtcctggctgcacatgaactctcaagccacttgacggcctcctgacctggcacctccaagcttcagggtctcactgtcacatgtcaccagccaaactaatgccttagcaggtgacagcttcacctgtgtgcatgccaatgccatgtgcaatttcatggaacctcttatggactcatgagactttgaaaatcatctctataaatcactaatgctgaaaagacctgcatttggacaagatgatagagaaagtgtttttctctttggttggggacttgtgagtctcctgagaacccttcaaattacccagttggcagacacttgttccaactctccaagctggcccgaagaaacacttcctctactctatgtagaacagaagagggtcccaaatg

SEQ ID NO: 70056 - DNA, 3751 bp, Homo sapiens
aggaggcaacaacaagcccaggcagctgtgaggtggccctgtcaggcccctcaaaggtaggggttggctccaagcaggcccctatctctttcttctttactgtggcttcggctgcatctgtttcagctggctcccaggcacatccattccagccgctggtctttgctcccagactttatgttaacaacgcagtggttcccgggaccccctgatgcgttttcatcctcaaggtcatgtgtagaagcatcctcatcgaaagcctctcacctccctcttcctatttcctgcctctgtcttagggatcttgcatccaggtgtctattgtctggggcccccatgcaaccatggtgacagtgaggccaatagaggcactaggggagtgtgctgaggggtttctgggtgcttcttgctgtaagggataagggtgatagaaggagggctccccttccccttcttcctgctttgttcagtgtgtgaccccctaggccagggcagctgtctcaacatcatgagccataaggaccaggagccagcacagagcagaggagcaggagggcagagagagctggggcctcagaccacacctgacacctctgatgagctacacccagggtctcgtcctccttaggcgttgttggcctggctcggaatcttgtctggggcatccgctgagggttgaagctggatactgcccctcgagctgaactaggacacagcatgtcctccctgggcaagcctgcagtttggtcaattcccggaaagggactttagttcctggaggaggcccagacagggagccctccctcctgcctcagctctgagccaagctctccagatgcagaggacagagactctcagcaaagcagctccctgcaagtggctgtggggcctcctccttaggcagagagagagggagagaggggtgaagacaccgtgctcctcctgaggaatctttatttttattttcaatattttttttttttgctctgttacccaggctggaacgcagtggcaccaccataactcactgtagtgttgacgttctaggatcaatcgatcctcctgcctcatccttctgagtagtgggaactacaagtgcatcactatgtcagtcaatctttttattttcatttttgcagagatggggtcgtgctatgctgcccaggcttgtcctgaactcctgggttcgagggatcctcctgcattagccttcgtgcattagcacgggaattacagccctgagccacaatacctaggtctcctgaggaatctttaatgacctgccagggtcaagttcaaccccttaactgggcacacgggctcctactttcctcactgctccctgcccacacagtcaccttgggtccaggtacacactgacgccctgcttccctgcctcccagagcccatctactccccccactcccattcccagcctcaggcctttgctcaggctgctccctccccttggaatgcctcccccaccttccccaccatgtgcaagtcacccatcctcagaggctcagccaaagctgcctggaccctgcagcgtcccccagccctccccaggctccctgagcactctgctttccgggggcagctctacctctgtgtggctctttgggcctctgtctccccgttaaactctgagcatccggcagggaccctgcggtgttcccagctgcatcccctatgactgacctgggtggcctctgccctccgtggcacagcctggctgaaatccgaggtgtgggaggcagcacttggactaaaagcaaccagcctctggacaacatggcccagcttcagtttcactttcagttgagggattgaatgtttttccttgctatctagatgctcatctctttttggggaagaacaaataagaccatgactctgatttcatgtacttttggtggctctatcaggtttctgagtttccatttattttctcccgtgtcctccccagtcttattacttttgtacgaggagaaagaaaaaagaaatttctaaaaacacgcgagccagctaacctctgaatcatagccatggtttccaagcctcccctcccccacggcaatggcccaggcctgcatctgggcccagctccctccgggtccatgacactcttatgcagcaaccaactactgccagggacttttacgggaaagaggtcatttccttcctgcacttgttgtgccttagaatacacacaaaaaagtcttgttcttctttgtctgtagtaggtacccatgaaataggtcctacatttaaaagaagaagaaacaaattcttctccaaaaataagtaaatcaatcccaaagggatctaagtgtaccccagaaagaaaaaattaaaactatactagaagaaatgttaaaaacaatgttgagttgggaagacctttcgaatcaaaactcaattcccagaagacttaaagggaaaattgaatagagttttacctcttacaaattaaaaattagaaagaacatcattcaagagccagaataaaatgaaagaataggaagcacggtttgcaatacttaaagcaaaggtaactgtccacaatccacaagaaatgctcaaatcaacatgaaaagactgaaatcaagtttctaaaaatatagccaggtgcggtggctcatacctgtaatcccagcactttggcaggccaaggcgggtggatcacctgaggtcaggagttcgagaccagcctgaccaatatggtgaaactctgactctactaaaaatatcaaaatttgccaggtgtggaggcacgcgcctgtagtcctagctacttgggaggctgagacaggagaattgcttgaaccccggaggtggaggttgcagtgagctgagattgcgccactgcacttcagcctgggcaacaaagccagactccatctcataaataaataaataaataaataaaatttaaaaatgggtaaaagataggatctgaagaaatagaaattaacgttaaccatatgaaaaggcactcaagctcacttttgaaccatatatgtaagtgatcacagagacatacgtttttgaaacattagataagccaaacctaaagtgactaataatgtccactgttagggaggtaaaggtggcacaagccccttcactgttgatggagtgtgaaaggttctggtgtcctggaggatcgtcagcgatactcagcacactttacaaagtgcccccacgtcatggcacagcacccactcctaggtctcagcctccagggagcagagggcaagtgtgcagggacaggggctttagagggtgccatgcagcgttgtttctatcaccaaaaagggagaaatcactaaatctcctgccatagggagtaggcgggtccctaacactatgcccattaagactaaggaatgcgcctggcacggtggctcatgcctgtaatcccagcactttgggtggcggaggtgggtggatcacaaggtcaggagatcgagaacatcctggctaacatggtgaaaccccgtctctactaaaaatactaaaaattagccgggcgtggtggcacgcctctgtagtcccagctactcaggagggtgagctggagaatcacttgaacccaggaggcggagggtgcagtgagccgatggtgctacttgcactccagcctgggcgacagagcaagactccgtcagaaaaaaaagactaatgaatgcgatgcctcccttaaagaaatgaggaggaaaagaagctgcacagaatcaaagaccct

SEQ ID NO: 70057 - DNA, 1943 bp, Homo sapiens
gatggggtcagcagcctgctgggggtcagcagggtagggcatcctaaccccctaaggcaggtgaaaaaccctgaggctcagagaggggaagtgacttccccagtgtcacacacctcttggagggcagggggaaggtcaacacctgacctcctgactctgacattgaagcaagaaagtataatgttaataatccaaaatcttccaggtttgtttctgcttctacaaacacagagggctaagctcacgctcccacagttatgctcacgcttccacagtttgacttttaatctcatgattgtcaagctgggatcatgtggcagacaccattctgcaacatgccgttctcactgcccctgtctgggccatctttcccactagggaacagcacagcttctttcttctctatcacccagaggcctgaaaaggaaccaggtgagtgtcagggacatggagtcctgtgatctacctgctcaacttcctgacatgggaccctcagcgagtcactcatctcccatggcctcagtttacccacagggcctggctcaagtaggtgctcagagtcagggtgggtgaaacaacctctgggttccttgttatctcttttcgctctctctctcttttttttttttgagacagagtctcactctgtcaggagtgcactcaggctggagtgactggtgcgatctcgactcactgcaaccttcatcacctgggttcaagtgattctcatgcctcagcctcccaagtagctgggattactggcttgtgccaccacgcccagctaattttttgtatttttagtagaggcagggtttctccatattggccaggcaggtctcgaactcctaacctcaagtgatctacccgtctcggcctctcaaagtgctgggattacaggcatgagccaccgcgcccagccaggttccttgtatctcaaaggaaatcctctgtccccatcgggcctcagcagcagcaccctggggccagcctcagggtggccaggccacaagaaggacaggccaggctctggatcacctcctgtcctccaccttctctggttcctccaaatattctaaaggaatggacagtcccaacatctgccttccttctggggtcaccgggccatgtctcacgcaggctggaactagagctgagccctaggaagctttgtgaacccagctgagctgattctgcctctgtctctactgtttgggggcccagagagagggagggagaagtccagctaaaacctgggtgcaaattcaggctctgccatggaccgagatgtgacctcagtcagttacctaacctctctgagctcatctacaaaaggtgaatgacccttctcttatagagctgctgtgaggatggggagatggggaaggtcagaccacccctaacttaccaaggaagcttctcttgaaagagtgtgagcaagatccagctgttctgagctgtgtggatcccacctccagccgtgcatctgcataataaccagacacgttctccaggctctgagatataccctggaacccaaaagggaaagtgaaagtcacaacttggcagcagctcctgatcaaacatgcaaaacaggatgcttcccagccccacccttggcccagtcccatccttggtccagcagcacccttggtcccaccctcctgctgatccaagagcagccccagacgtccttcttggccaacccacctgcctcccatacttagggttgggggtttgctgtgtcttcaggaagaaagacctaccactgaaagactatgagaccctccagattactccccacccccaataacaccacactccccagatgcccacctcactccctccatgccatcagcattaccacagtccatcacacatgccgggtggacgcttattgcatattgattgtattgctgttggggttattttgttgttttgttttg

SEQ ID NO: 70058 - DNA, 1886 bp, Homo sapiens
caacaggcagttaagtagacattagcagctgggaggagaaaagagagcagaaagcctgtcactgcaacagctcctggcccacctaagttcagccccagagccattctaagacccccctaactgatgaagttggtggtatagtttgtggccagcacatcctgaagaaagagaaactagggcacaggtggaaattccctaaaggggcacatgcccagtaacatgaaactgtgccctcaggtcaccccaagttcattataccatcattataataaaatgtggttttattatacaaaagccccagagtgggcttttctgtgaaaattatgggtaaaaacatgcattgcctaattttagttatataaccataaactgccaatcagatgacatcgtcctttactcagacacagccccaacctcaacttctctccacaaaccgcacagaagcaccttaaactctatatagaggggctgacttcacttcacagaaattagcccactgtccctctgagagtgtctaactgtgcttcaatacactttgctttgagcttgcattttggagttagcctgcaattgtttgctcactctcagaagaactgagattactggtccagaactccagctctgttaatctcctcagttaaaggatccatcccagcgcagaattcctggtaatatcttagtgctgtgacctggatgatttacgttcagcatggcttttaatatgtgcttgattttagcttggggaactgaaacatattttgctaaaatgcttcctttcgctttgggtcaagatgtttgtgctatgtttcgctgcttggctaagagaagttgcaatgagtgttgtatttgctgcattagagagggggtatatcccccaacatgccaccaataacttttagagaagggcttagagaaatcttctctggatttaggtttaattagctgtttaacgtgattaaacaacttcattaggttgtagtggccattgaagcccagagcttgttaacagcccagggaagctttgagaggcaaaatggtttcttatgctctggccacagagccaggaatcaccctcaactccctttagactgggcattttggctggatgcaatttttaaaattactgattaagagagccgattgggattcagatcatgggatagcttggataaatgctaagtttagaggtttacagccgggaacgaagggtaggcccatagtgggtcataacctttggagaactccccaaatcgtcctcgcccacccttttgggcactcaccccacccgaggccccctccctgccacactgccataggcagcagcacagcttctgaagatcgttttgcaattttttttcctttttcttttgaacagagcttcatttcttttctttctttctaaccacttttattcagaatctaggggacaaatgttttcagcaaggctgtagtacccactgtaggaaggggtctccatgctgggcacagccatggtccacacataggtacaacttgagagacacacagactgccccaggggaggcggagcctccatctaaagagcaggggacactctctcctggtaatggtcaaggatattgggatgtcgagactaccttgatctcagtgctgtgtattctggattgccagctgcatccacactcctatgtaaaaccacagagggctgcccaaactgatgatgtctccacagacaaatacacttgtgagactttagtggacctcaagcctctctttaaaagactgccaaaaaataagtaatgcccactgactttccctagtgcctttttttaaatattagctttaagttggattgttatagttattctcatatatttgcagttcaattgcctcctcctgaatgggtg

SEQ ID NO: 70059 - DNA, 2984 bp, Homo sapiens
aagttttaaaaccttgtttaaacacaacatcaacggactgcacaacatcacagaaactgttgaatctgtgtttacaccttccctagcagaggtctatcagccatttccattcctgcttctgagtggaatcaatcagaaacatttccagcccccacttctgttaaccgaccagaataagctgtcaatcctagggtcgagcccacagtcaattgcatactccttaaaagtctataccaacaaacctgttacaacctccgaggacctgtcgtctatctgtaatactatctgactaagcactcctttgtcttctatcttcattgaggatgaggccattacttggattttttcctaatatttccaaggcttgcaatcacacttgtaccctattttccacccaattatgtgtcagcttagtcactgacaacaaaaaatgcaaacatacctgatattctaattcttctttgtgttttattcatttcccaagccccccaacagaaccactatgtggaaagaagccagctattctggatctacccttttccccagacccacaccagaatatcattttaaacataacaacttctggtttcagtctcacaacttcgggcaaaatcattgcaaaaaactgcagctccccataatttcacaatattggttgggatcccatcactccttcctctaattgggcttttgattcctctttcattctgtcaagtactgcctgtgttcccccattacatgaactagccttgacttccacttctgagggtattaaagcagacttacacagcatggaaaaaccctactttagtatcactgttgatatttgtcttaacatgacaaatcacatttttgtatagaaacaaggcatatctctgcttgtctgctaattaaacggggatttggccctagtttacatcatccccaaactcactcttatcgatagcattcccctccctatacacgctcaatctggtaaaactgaaagaggagttttaacagcactgactataattggcgttctggctggtattggcacgggaactggaggacctccttaactccatttttactgcccagaaactcttcttaaaaattactcaacaaattattaatctaactaaccaggtcaataccctttcagaacaaattgcttcattagcaagcatagtcttatgaaattgatgagcttttaatttgctcacagccaatcaagggggagcttgtgcaacacttgataaacattgctgttttcatcaaccaatcaggtaaagtgcaaaccaacttaaaaaaattacagacagggccaacaagttaatggaaaacagagtttcaggaggctttgactggtggaaatttaacaactggtcctggttttcctggttagccccctttcttggtcctaaaacagctttatacaacttatagctttcaaacgatgctcatttgatttacaaggttgttttgtttcttcccacctagaatccataaaactccaaatgattctacacaaggttaccgcgaggtctcaaccatgtctgatatctacgtgggccccttggatggccaccacttttctctgcccaacctaccagctacaagagagcaaaaaagagaacccaattattaccactgcctcttgtcagcaggaagtagccagattaattgtcaccgatctacccaaaaatttggctttttttctctaaagggggaaatattaggtagttaaatagacattagcagctaggagtgggtaagaaaagagagtagaaaggctgacagtgaaacagcccctggcccacctaagtttagccccagaaccgtcctaatgccatcctaatggatggagtttttggtaaagtctgtggccagcacatcccaaagaaagagaaagtaaggcacaggtggaagtctcctaaaggggcacatgcccagtaacacaaaaacatgccctcaggtcaccccaagttcattataccatcattataataaaatttacatgtggttgtaccctcctttccccagagtgggcttttctgtataaatgatgggtaaaaccatgccagtttaattttagttatataaccataaactgccaatcaaatgacatcatcctgttactcagacacaacccaaaccttgactcctccccacaaaccccataaaagcaccttaaaccctgtaaagaggggcttatttcacttcgcagaaatcattccgctctccctctgagagtatattactgtgcttcaatacactttgccttgagcttgcattttggtgttagtctgcaattcttcgctcactatcagaggaactgagattgctggtccagagctccagctctgttaatccccacctctgttaagaatccatcccagtgcaggattattggtaacacttagagggaaggggcctaagcccactgctcagccacagtcccgtggctaagaaggcgtgctgtcggattgctggcggacttttctgctttaccccaggcagaagggttttgagaggggctgaaccctgaccaacatgaccctttcactgggaactgtttcatcctgggcaaatgtccctgcagcctcgtggccaccaccccatacacctgccagattttcagggaggaacaggagggtgattacacaagaactgtacgatacactttgaaatatacccacttctctatttaattggaatttgataaccatctcttaaatgggccaggagtatgatctgagtttacaggtgaggaaactgaggcaaggcatgaggctgtggctttcaaccagcaactcggggaggagccaagatttgtaaaccaagatgcgtctgagacagatctcaatccgtttagtggtttattttgtcatggttgaggatgcccacaggaaaaaaaaaagagacacaagtcacagtcggatctgtggcccacaagttttcaaaagagggttttaagggcttcaatatttcaaaggtaaaga

SEQ ID NO: 70060 - DNA, 994 bp, Homo sapiens
ttggggctatcacagcttgctgtagcctagagcccctgggctcaagtgatccttctgcctcagccttccaggtagctgggactacaggcacacggcaccatgcaggactaatttgttaatttttcatttcagagagacagcatctcctgtgttgcccaagctgtcttgagctcctagcatcatgtgattctcccgcctctgcctcccacagcactgaattacaggcctcagccgtggcactgcacccttctgaggaatcttcagtgaaaagccacggtcaagttcaaaccccatagcagggcacacaggccctctgatgctctggaccccaccttcctcaccgctccctgccaccacagtcaccttaggtccaggcacccactgacgccctgcttcggtgcctcctggagcccatctactcctcccactcccatccccagcctcaggccttcactcagctgctccctcgccctggaatgtcccccccactgtccccaccatgtgcaagtcacctgtcctcagagacccacccaaagctgcctggtccatgcggcggcccccaaccctccccaggctccctgagcactctgctttccagagggagctctacctgtatgtggctctttgggcctctgtctcccctttagactctgaacattcaatggggacactgttgtgttcccagctgcaccccctacgactgacctggatgccctccgccctccctggcacagcctggctgaaatcccaggtgcaggaggcattacttgaactaaaagcaaccagcctctggatgacatggcccagcttcagtttcactttcagttgagaaattgaatttaatttttctttctatcttgatgggcatctctttttggtgaagaacaaataagaccatgactcatatttcacagaaattacccccctgatttcatggacttttggcagctctatcaagttttttagaggggaaaaatcttaggctgggagggga

SEQ ID NO: 70061 - DNA, 1627 bp, Homo sapiens
gagtcacacagctcttggagggcagaggggaggccaacatctgcccttgtgactctgatattgaagcaaaaatgggtgattttaataatccaacagtgtccaggtttgattctgcttctacaaacacagagacctaagctctcactcctgtagttatactcacaattccacagtgtggcttttgaatctcatgattgcaaagctggcatcatgccacaggtaccattctgcaatgcgaccttctcactcccctgtctcagccatgtttcccattagggacacagcacagcctgtttcttctctatcagctcagaggtctgaacagagggacagaggtgagggccagagacgtgaagtcctatgatctgcctgctcagcctcctgacacgggaccctggcaagtcattcccctcccagggcctcagtttccccacagggcctggcacaagtaggtgctcagactcagggtgagtgagacaacctctgagttccttgtgtctcaaaagaaatctgttgttcccattgggcttcagcagcagcaccctggggccagcctgggtgtggcccggccacaaggacatgccgggctccaggtcacctcccctcctccaccttctttgattccttcaaatttcccaaagagatgggcacccccaacacctacctttcttctggggtcagctggccgtgtctgagggtgtcagaaccagagctgagcccggggagctttgtgaacccatctaagctgttttccccacctctctctacagtttacccgcccagcaggagggagggagcaatcagactcaagcctgggtgcaaatcccggctctgccactgctttcctgtctgatctgaaccagctacctaacctctctgagcttatctacaaaagctgaatgatccttcccttatagagctattgcaagaataaggacatgggggtagatcacactatccccaacttaccaagggatcttcctctgacagagactgagcaagatccaactgttctgagctgtgtggatcccacgtccagctgtgcatctgtgtaataaccagacacgtcctccggcctcccagatataccctggaattcgaaagggaaagtgaaagtcacaacttcccagcagctcatgaccaagcacagtaaacacgctgctccccagcaccacctgcagtccaggcccagcctccttgctgctgcacttagaggagcagccgcagaccagacatccgggtccctctcatccaacccacctgcctcacatcctcaggattcaaggtctgctgtgtcagctgcccatgtctcaggcagtcagaaccagagttgagcctggggagttttttgaacccatctgagccgcttgccccccaacccccgccccgatctctgcagtttaagggcacagcaggtgggggagagaagtcagactcaagcctcagtgcaattccaggctctgcccctgttttactgtctgatctgaactagttacctaacctttctgagctcaagaaagacctgccactgactgaccgtggggctctccagattactccccgtccttccgttcccccacattcctcagatgcctgccttactcccacacatgccatcagcatcagc

SEQ ID NO: 70062 - DNA, 1375 bp, Homo sapiens
aggggaatgtggatgcacgggaggatggggagtaatctgcagggtcccatagtatgtcagtggcaggtctttctccttgagaccacagcagacccccagccctgaggatgcgaggcaggtgggttggatgagagggatctggatgtctggtctcaggctgctcctctaagggcagcagcaaggagggtggggctggactgaaggtggaggggagcgtgtttgctgtgcttggtcatgagctgctgggaagttgtgactttcactttccctttcgaattcctcggtatatcttggggactggaggacctgtctggttattatacagacgcataactggaggtgggatccacacagctcagaacagctggatcttgctcagtctctgccaggggaagattccttggtaagttggggacagttgacctgcctccatcttattctcacagcttttgtagataagctgggagaggttaggtgactggttcagatagacaggaaagtagcggcaaagcctggatttgcacccaggcttgagtctgattgcttcccctctcctgctgggctcttaaactatagagggttggggaaacagctcagatgggttcacaaagctccctgggctcagccctggttttgactgctgagacacgactgagtgaacccagaaggaaggtttgtgttgggggtgcccatctctttgggaaatttgaaggaaccaaagaaggtggaggagaggaggtgacccagatcccagcctgttcttatggccaggccacaccaaggctggccccagggtgctgctgctgaggcccaatgggggcaacagaattttttttcaggtacaaggagttcagaggtcatctcacccaccctgagtctgagcaccaacttgtgccaggccctgtggggaaactgaggccctgggagcggaatgacttgcccagggtcccgtgtcaggaggctgagcaggtagatcataggactccacgtctctggccctcacctctgtccctctgttcagacttctggggtgatggagaagaaacaggctgtgctgtgtccctaatgggaaacgtggctgagacaggggagtgagaagggtgcgttgcagaatggtgcctgtggcatgatgccagctttgcaatcatgagattcaaaagccacactgtggaattgtgagtataactacaggagtgagagcttagatctctgtgttcatagaaggagaatcaaacctggaaacttttggattattaaaatcaaacatttttgcttcaatattagagtcacaagggcagatgttggcctcccctctgccctccaagagctgtgtgactctgggaaattcacctcccctcccagcctgagtattttc

SEQ ID NO: 70063 - DNA, 468 bp, Homo sapiens
cactccagtcagctggggcagtggccagaaccagtagccttcagccaggtgaaagggcatgaggcattggaagggagcagatgccaggcaaagtgaactcctgtctctccggggttttgtttttgtttgaattcaaagtactcagagatagccagactgcaatgtctgagggcacccttacctttgacaccacctgcaaatttaaggggatttctaaatccatcctttgattttgtaattcactggaaggactcacataactcactgaaaactgctatttcacaattgtggttgatcacacggaaagaacacagattaaaatcagcctaagaaagagacacacggggcagagtttgggagggttttaagtgtgaagcttcattgtcctcaggacgctgtgttctcctgtgtgaatgtgggacaaaacacatgcggtgttgccaaccagggaagctcacccagttaagg

SEQ ID NO: 70064 - DNA, 819 bp, Homo sapiens
tcctggcacatcatgtattcccagatttacaaatccttctgctcattccagaataaacttgttatcttcagagactccctttctgttgttattttaggttgacgacagactccctgaacgtaatctcatagtggagcaaccagaatggggactgcagactcaaatccaggtgagaatcaggtgtctcttaacttcagggacgtgggacgtgagcagagaccatccatttggagattccgaggatctagtgactaagaatagggctcagtttcaccatcaacaccgcaggaaaattcacccaggatgtctgcagctccagaggagggggcttgggccaaaatcttgggtccatatgcaatttcggccactgagaaggcaaacccaactcgaagggggaaatgaaccctgaaattgctttggaagatgtgcggtgacatcgccagcaccacctagtggaagctggaagtgtggacagccctcctcacagccaccacccccaccccgccctgccccgccaatggagaggtgtgcttggccaggtcatgcccgatgtcattgtctgtgtgcaccatgacagggaccccagcgccctgttctgctctttttcaaggcaccctggaaggaggtggcgagcttcaagctgggcatttgacaatgggggcttctgaaggcatcagtggctagcggagacaaacaagcctaggactgcaaagtgcaggggaagggaattgtgtttcatgcccacagcccctggggaccccataggaggctgagggagcagccactggtcccggccactcacagcccggccactagcag

SEQ ID NO: 70065 - DNA, 679 bp, Homo sapiens
gtacagtcatgctcatagcagcatcgttcaccatagccaaatggtggaggcaacccaggtgtccattgacagatgaacggataagcaaaatggtacgtgtacccacagggaatattattccgccttaaaagaggaaggaaattctgacccatgctgtaacaaggatgaaccttaaggacattctgctaagtgaaataagcccgtcacaaaaggacacatgctgtatgattccgttcatgtgaggttcttacggtggtcaaatttataaagataaggagcagagtgttggttgtcaagggctgggggagggagaatgagcagttcatgtttactgggtacaaagtgtcagttttgcaagagaagagttctgtggatgatggtggttgtgcaacaatgtgaatgtaattccacgaaactgttcacctaaaaatggttaaaaaggcaattttaggttatgaatatcttacagttaaaatctttaattaaagtcctttcaaagcccaacctttgcagaaaaaaaattatagcacctgagccctttttggtttgcagaacattttcacacacatagtcatacatgcttcaacgacggccctgtgataaaaacatttattaatttggcttcccagaggagaaaactaaggttcaaatggggtgaaacggccaggtgtggtggctc

SEQ ID NO: 70066 - DNA, 576 bp, Homo sapiens
ctccagctgtgcaatcttggcctcgagggcggtgatggaggccttgtacttggacttgacagtgccctccatctcctgcagcttgaccttaagctccttgttctggcgttccagctgctgccgagcattctcgttcttctgggcgtggctgcgctccaggttcaggtcggtgttgatctggtcgatctgcagaagaagggccagtgaccttggggagggctggggccctggctggagggcatgagcagggccagaggaaggtggcagcaggatcccaccaaacccttggggtccagagtcttgggtctcccagaaaagggaagattagaaacttctgaacacccaacacagaagccagagggggacctttcaggtccaggtgcctggacattttcccctaagcgcctggggagcagctggcacttggcctgtgcttctgccggctgggtccaaggccagctctgccgtggtggctccagccagagcccagagtgggagaagtcctggcacccacctgcaggttggccttcttcagccggtcgttgatcagctccgtgttgccctgctcctcctcca

SEQ ID NO: 70067 - DNA, 1299 bp, Homo sapiens
agccctgggtggaaacacggattcagcgacgtgtgaaggacacactgagtggctcgcaccacctggtcagggccctgcgtgactaggcactgggagaatgactcacggctttccacgtgcatggcctcaggagacacatttaaccgttcaacaccagtagccaccgaccagctaggctgcctgcctcttccgaggtgagctttctagcatgcctgacctcagcagcgtgtggggctgggcactgcctccaatctcttcttctgcccactggtcattcaggagggaaaaggaagcccagacagaaagaagaaaaaacaaacctcacacccaacaccaatggcagctgcccctgccctgggccgcagcttcctcccagccccctaagcatcaacggggtgggggcgcagaggggctgggtcactctcattcacaaacacaccccacaccctgctctctgatgtggaaactactcaggaggcaagctctaggggaggcaagccttactcccccttgcctttctcaaaaaacacgagtccttcaagcctgcacagcgaggacagagattagagacctgcatcctcgactagacagacgggaagacagaagggagggaggcggcaggaaccacagcctggggaagacagagcaatttcattgctggcccctaacgacagtgtggcaaccgataagggtttggaacaaacatttttgtcatcccagccccctgccctcccccactgcgtctccctgtggtctgccccagctgtgggcatgtttagtcaccggctctactagcaggcaagaatgtacctgcgagtgctggcaagtcgtgagcagccaacggcccaatgctaccataaaaggaaacattccccaacccttccagaggaaccgttttcccagggctgtccctaggatggctggaattcctctaattgtgtgaggaggagtcagaggctctgctgctgaacaacaggaagcagagcccccaaacacactcgagggcatgcacacagaggcgcacgcacgcacaagggcatggacacacacatagacacgcaagcatctgtgcatacacagtcacatatggaggtaggtgtacagaggtacgtgtgcacagaaatacatgcgcacacacgtgtgcaaagccatatacatagatccacacaaggcacacagctgcacacgcattcacagatgcatatccacaagcacaagtgcaaacacaggcacgcaaggcacatgtattcacaggtgaatgtgaacatacatgtatgtacatagccatgcacacacacg

SEQ ID NO: 70068 - DNA, 2348 bp, Homo sapiens
ccacgaatcgtaccatggccccatgcaaccgaaaaggtctttccaatgctcaggaagggttttggtctgttatcttgtgtggcctccaataaccttacaaggtattgtattgtaatgtacaaagcaggtattatcatcattgttttgccatctttccacacagcggttcttctggatttgttcctgatctcagaggcatctcttctgggcagtggggtggttagaattcttagcaaccagtgggctctttggcctactcagtttactctgcagcccacctccccaccctatgcattctagtggagactgccattggcgcccaccccatcaacccttccccgcactgtcatctcacaggatgagcacattcagagtccggcccaatctgcttgttttggctcgagtccttatttggcctgtaaggactgaaggcttatttgaaaacgcccttccttcctctaaacgggaggaggccgccagggacaagcctcttctgggacacgagccccctgccagatgaaagtctagccgtggtaggcgcctgaacccactgccccagcccctctcttggtgagggtggggtagagatggggttatgagtcactctgcagtagttttcagacttttcaaaaagcagcggcagtccttcctcagataaaatcttcccaaattcctgagcaagggacagtgggtggtggagacagggttcctcagagcacagtttgacaaccactagtccatgtgtctggagcagttctgcaaaggaggaagccacagccgagagcgctgtggccctgggttccgctcttccccacgcaatgcctggccccttgacctctctgggaatgaagggactgctctgaggatggaaggaaatggtgttcctgtcgtacacggtgtgaggcagatgcccagacatgccgtcctcacccgcctgctgtctcggagctcccaactgagcaattccctggcaccgccacgagaaagtctttcataaaagttacaaattcaggaaccaggccattttctccctggatttcattttcaaccgaaaatgtcctgaggccaagcccatgcagtgagggcatctgagctgatgtggccatctacctgtggacaggtgtttccagccagctcagcaggctgggcccaggagggaggaaggggaacctgaccgcaggtatttcatcccaggtgcagacttctgctgggggcttaagcctcacttcctctgtgagaggagctgcagctcactcttgtccataaaaggccacgaggctcgcagagcggtgacatcagcccaacaggaagtacagaggaaggggcctgcttcaccagcagccactgctgggactgactcatcacccagctcccaagatcacacctcccgaggttccagcatggagcagctctctcgggctccacctgggagaggtccctgcaggaccccatcttcggctccactgggcttcttgagaaatgggtatgggccaagaaagaaaaacaggaaaaagggcagtttcaggttggacaacatgcccacgttgggtgagactgatgggataatctgagacaaatgggaccaaaactttccaccaccagggagtcttctgctttcagggaaactccagagtggcccctggggggtggcttgctatatgtgttggcactgtgagccctgccctgcgttgccaggatggcttgatcagagttgcacaaatggggctgagaactcaggtctctggaaacctcacgcaccccaggactcccctccatcgaacacccctatgagcacagcactcggcacctcccgcaggcctgcctcagtgctgcaaagaaagggccgcgacactctcatgacgagaagctctgcttctccacagccagctcaattcacaagcttgggttacaagtctttgggaggcaaacagagaggtgaagaaaagcaagtgcaaaatgatgcttcatattagcagaggctgcagatctgtgccgagtggggtggagcttcctggcagcctgcctgcctagcaatctgccagcaaaggaggaagccccttccgtcgctcccaggcacacaatgtggtcatgggcgagtgtgccctccaggccaccacggtaggcccagaccaagggacatgcctgctcagcagcatccacaccagaagccagttcgactcggcccagtgcctctgccccatagcccctgtgatctcccaggtggaacctggtttgaacctgctgagacccaagtccccacttataggaggcagagaatgggtagccctccccctccagacactctggataattaaaaaaaaaaaaaaaaaaaaaaaaaaaaacctcaa

SEQ ID NO: 70069 - DNA, 2740 bp, Homo sapiens
aaaaaaaagacataaaataacaatgccttatatatctgtatggttttatagtttatgaaatgctttcacacatatttcgctatctcgaaaggtctttgtagtaacaactctgtaaaccaggtaaggtatatattattaccaccaatttacagatgaggaaacaagctccctggatgtaaggggcttctccatagtcatccagtcctgtggcctttccacgactaacaccatcgttattcctgctcagaggcgcaggctgggatcacctgaggtgactaccctagtgtaaaactgactcagcttgtggccaccagaggaggcagcccagaagctcactgcccagctcccgctgggaaatcaaggaagatcaggaaggttttttttccctctatgagatcaagccccctcccctcaggcccctgcaatccaggaagtccccagatccaaacacggaacaccatgggcttttgtgcttccagattccaagagggacttggatcccaaggaggctgggggcatgggagggaaagaacaaagggaaaaatctaggctgaccagaacttttcatctgggctcattagtggttttcagtcaaggccaaggggctcccctggactcactccagaaggggcggttttccaggaaaaaacctttttgctggctccctttcgccaggagggacacaagtcccaggaacagagcttggcagcatcaccagcttccccggccggtggctctgttgacatttcccaacacaggcaaaccccacagacccttgtgggggccagggggcacatccactctgcaaggaccaccctgagagcaggccgggctcagaatgagtcagagcaaacaagacaggaacggtggctgtgaactgcctggccgcccctcgtctttgctgcgggtctgaggtctagggtctataccaggagcagcctccagggcaccaccagcttattttcagctgtctgcacttcaccctggccagtccattcaagcaaatccaaggtttctccctgccaggtaaatcctagttgttctttctccctaccatgtgtctaaccactaactagtcaacaggcacccctagggtcccagcacccaggctccccaaagtctccccatcgcgcccctgccctgctcaagaccttgcagcaatcacagaacacaggtctcaggctgcgggttctcagccttttcatagacctcaaacccacaaaggataactccatgaatagcagagagactcacttgaaccccatgcccccaaaccctaagtgtgttgctgaccccgccaatgaacgcatctgaggacatcggtgcccctcacgagactcctaccgagagcagaaggggcaggggatggttactaagtacctcccagcaccacgctcagtttattcaccacctcacctaactggcaaccatcctgggaaagagctgtctcatcatccccaattcataaactaggaaacagactcagaaagggcaagtcacttgcccagagttgcccaacccaggcatggagtgggacgctaacccagggacgcctggctcctgtgcctggcctcctcccagaacaattgtgcctggggtccctcggaagccaggccggcactggagctgggccctaactgtccccacgagctgagtgtgatgtggggagtggagaggaatgcattccagagcgttcaacaaatatttgccggatgttatcaggtaggcaggaaggctgagtgagccttcccagtgtggaccacatggcccgtcaaaaagcaggcacgttagaactcaagatttactccctcggcccgctactgtcggcgcaagcttgcagcccatcagcagtggcagaatgagctctgaccgtcctcaaacgctgcttcgccccagcaatgccaaccctaacagcaaagaacccatctggtagcctggcttctcggcagcccatgggcaccctcaggctgcagggcccaggcactcagactgccctggaaatccgctctggagggtcacaaacatcacaccagctggcggggaggaattccacccaaccaactgccctcagaacctcaccctgtccgactttcaggctttggtgggagggcaggggacagtcacaggccagtggtgtccacttgaagactagcagaggcctggccaccaagccacagttcttgcaagaggaagagagaatgcatcccaccagggacaccccccgcctccaaggaccaaggctccagctgaaggtcagagccccagcttgctgggcacctccctcccagaacttttcattaagcaaggctgggctctgctcagcctggccaaggacagggctatttggtttcagcaactctgctagaatgacgtgggtgagcagcggcgccaagatcaatacacgggttagaccggcagggagagccgcaaaggtcaggataaacagtggagtttctatgaaagccccctcggccacctgggcaggatcagccacattcaatgatggggagccacagggctgcagcagagctgctgtttccactcgtatcctgtgcctctgggggcgtgtgtgtgtgtgtgtgtgtgtgtgtgtgtataagtgtgttcagtcaggttaatactcagacctctccaggatgcatgtgggttaaaccaccttatctataatccatatgcctcatttatgaatgggggatagtaaagagctgctaaaaattcaataaggggcacgacagcggga

SEQ ID NO: 70070 - DNA, 1676 bp, Homo sapiens
ggtctgggaaatgctggtctggtgagatgggcacaaagcctgtggcagaagagctggatttgagtccagcgaggtgctgaccagctgtgcaatcctgcaggcaccacccaggcctcggctttcccacctgcaaaatgtcctatctgctcacaggtatgcacaaggccactctctgcaatacacaccagggctgtcagagcagttatctacagggtgggtcaataaagtggctcctctgtcacccagggctaataacctacagcagcctcgacctaggccctcactctccccaggctaacaaggagtggggggctcctcccagctgccagtgcccaggaggtaggagctgaagactgcgggtgggccccccttccctttccacctcaggaatgttgtttgcttacagaagaagctggaacttgtttccattagcagtattccaacccaagcctgtgttgatgcttagcagataagaaaaccagagaggaacttagtgcccgggccccagagcctgccccatctgcaggttctgcctttgcctccttgaagcgggcatggaggggggctcaggtgactgctgaaagtccaggaaacaatgaaagatgatggcatttgcctgtccaagggagggcctgtggtcactttcactttgcctggcaccgaaggaaactcaggctatcaaaaacaacaccagtacgtatttcaaatcatgttgtacacaatggatataaacaatttttgtcaacttaaaaattaaatgaacaatttcttttaaaaaaaaaatgacaccagaaaccagaatgtggtacatagagtccctcctcctgcatgggaaggggtgggggcaatagcttgggacaggctggaggagataaactggggcagctaacccaggatcttatcagccatttaggaatgtggactttattctagggataattggggaggagcagaggtgacatcagatttgtattttaaagtaattggctgggggtgtacggtggctcacgcctgtaatcccaacactttgggaggacaaggcaggtagatcacgaggtcaggagttcaagaccagcctggccaacatggtgaaaccccatctctactaaaaatacaaaaattagccaggcgtgatggtgtgcgcctgtaatcccagctacccgggaggctgaggccaagaattgcttgaacccaggaggcagaggttgcagtgagccgaaattgcgccactgtactccagcctgggggacagagcgagactctgcctcaaaaataaaaaaaacagaaatcatcctcccttacctgcatggagggggcaatgagaagtcagtggttggaaaatactggggacttgcaaggagggagcttccaatctaagagaagaaaagacagttccctgaccaggctaggtggagagtgattaaatgacacgagagggacaagtgcagccatagactttaccctctgatctcctactccatagagcctggctcgaggagagtcctggaatcaccgtcctacgacagtgagaagtgaccaagcaatcccaggagctccagggccagtgtttccagagcatcttaggcacagatctcatgtggcatgtgtcacacagactacacaataaagtgtccaatggggtgtcctccactaagataccaacttcaggaccacag

SEQ ID NO: 70071 - DNA, 1479 bp, Homo sapiens
aaaccatttctgagtcgctctgttgcccgggctggagtgcagtggcacaatcttggctcactgcaacctctgcctcctggattcaagtgattatcccgcctcagctgggactacaggtgcatgccagcacgctcggctaatttttgtattttagtagagatggggtttcaccatgttggccaggatcgtcttgaactcctgacctcaagtgatccacctgcctcagccttccaaagcgctgggattacaggcatgagccactacacccggcctgaaaccatttcttaatgaataaatcaaacaaccaatgagccagggcagaaagcagcaaaagtttgaggccagccctgccatcaccccagaatgatagcccgcccagcatggatagaagtgtgccccctacagcctttataaccccaccccaatgccttccaccagtgcctctcaaccatctttccagccacacctctcttatcccctgctacaaccctccattccagtcactagagcacactccccagagcagcctttgcttcagctgtcacccagagacaagctggagggcccatctccccaattctccacagactgagagtccccaaaaccaagtggacatgccatcgcccccaggcagcctctcctagtatgaattactcatagtatgaattaccctagtatgaattactcacccttctccctcctccccaacaggcccagcgcaatctgccttatacagaaccatggcttcattgcctgtgtcctctgctgtctcttagaactctctagaggcaggaactgtctccccaaccctcttgctcttgcccagggtgctgcagagagagcatcaatgcttgttgaaaataactgaattgttgaaaatgcttgcaagtattttctgggaacctggcagtccaagagaatgaccactccaagggtagctggagggagagacagagggaggcaggaaggagggaaggaaggaaggagaggaggaaacaataggttaagcagcttttgccccatgttaagaggccaggcagacagacctagggctggatctgcagataagtcatctacactggacccttggctttgcttttaattggttcaatatttgcacagtgacatcacacctgcgccttacctactcaataacaagctttctctcagtcacccagaagaaactgcaaagaaaagcaaattgtttcaggtatggtggggacgtcccctcctaaatagtgaggggcagatgatcccctttgactcacccccaggttggaagcggctgacaggggaagggtttggttgggttcaccaagcgcaccaagcatgtccccctgcagatggtatctccccagctggctggaggcttcccacacccccaggagggggaacttgaacccttcagattcctgcagcaaagttattccttcccttagcttctgctgatagaatggtttttctttcctcaagcatgtg

SEQ ID NO: 70072 - DNA, 1197 bp, Homo sapiens
gttatcctctgagtgattatttaaatcacacaaaaaaagcgaatgaatgagaagccactttcccccagtagccatctcacctctagtcctgcagggctgagggctccaaggcagagatcgggtcaccactgcatccccagtgccccacatatgggaggtgctgaactaaagtcatgggagaggctcccatcttcccaaaggtccagactccagggaccaactccagtcaaatctgcgtcacccactcttaagtgcctgatgttaagcccaatcatcttctatcttattgtccaaataagtccacatgactatggtgtggctcatgtctccccttagcaggacagacagcaagggccacccacaatgggccatagcttctctgtggccatccagggtcctcaccctccgccccaccccctgcctcactgataactatatctgccgtacactaatttttattttgtttccaagaggcacatcactggccaggggtcagcaacaatctccctgcattgatcaagcggtcattacagtggactctgatcatgggcttcaaaaggagagggacctgctcatggtgatttttcacttacagccttcacagaaggcatctgaggacgagccgcagccaggaggtagacaggctgcctgtggaatgccagagccaccacttaactaacagcaaactttgcagcttgacttgggccccaagcctcagtttctccacctgtaaaatggagctgatcccagctacccccatggacagctacaaggagccccagtgggtctagctgacagcccccacccccacccccaccagcccctacttctgcattggatcggagtatcgtctaactcacagtgccactgtgatgacaaaataagctcccagagctgggctcggggcagccccgaacaccagcccctcccccatgatctttgcctcctctcaagacagcctgtgtcaccactgagctcataatgagtcagtcacagacgctgccctcacacagcccacttcgagggtttgaagtcacatcctgcctaacccaactcgacatgatttattccaccccaggaaggtagctcatttcccagaattttgttaagccctttagtaaaggagtctgatctggcaaggggctccctttacagccctggctgaacatgcagctcagctcgggcctggaggcagga

SEQ ID NO: 70073 - DNA, 733 bp, Homo sapiens
ctgctccactgcctctaggggtgcaatgagacagcgaatgcacacagagcatctggcaaggcgtcacataggacctggtcaacagcagttgctccgtgatcaggaaggagaagcgcagaggtggacccgcaagctttccagtagcccagggccaaagcaccagtatctgtcctcctgtctgctaccaatcccctccagcagactcacttttaacccaatttctctaagataacagtgctgggaggtggaggagtgttatctccccacccttacccctcccagctgtctatatcgccctaaacagccaggaatttaataagcctggagttgtctctgactcccaaccacaaccaattcggaatgccccaggtcctgcagcacaacaaaggctgccctgcaaagcccggaagagcctgcgaagcctgccccgtccgcgatagagcatcacattcttcagattcttgtgtaaaagccagaagtaaggcaagggggtgggggtgggggggctctaatttcaacctaagggtcattaaagcctgtgacctgtattaaaagggaagagacccacccctctgcagcccctctgtaccacgctggtcctccaaggtgtatgatactgcacaggtcagcacacccaggcctcacaaccagaaagcgccctcagcctagcgtccccactttgaggacatcaagcctccaggacacacagctagtcaatggcaggagggatttt

SEQ ID NO: 70074 - DNA, 1062 bp, Homo sapiens
gatgagaaggcaggagaggcgatggaagtagatatggaaaataactggcctgaaaatgaggagctgggagaggattttagatcattcacttgctacctggggctagtcacgtaggttttcttggactctcaacattcccagctacaaaataggaacactaatactgccaccttcatgggattgagagacttttgttgcaataacttgaaagtgactttaacctttgtaacgtgatataaaaaatagactgaaatttttaaacagataaaaatatatcacctggcactgtgccagataaattgtggacagataaaacatataaacaataaagctatactttattagcatcaaaaccctctgtggcatttattttcctcattccacagataaggaaaactgaggcacaaagaaagattgtatgactcactcaaggtcaaagggcctgcaggtgggagaaccaagattagggcagatggtctgagtccagagtgcctgcctatttacctaagcaccagacacacgcccatcatgctggtgaggctcagaagccaaagaaataaagccatctacccaggacatcagggtctgtgccacccacattctagtatgaatatcctcacctgtttctcaagcatgtatcaagtgctcaccatgggcaaggcaccatgcaagggtcctggcgacaaggcctctaaaaggggaagcaagaccagcacataagccagcacagagaattgctaagacatgaagcagtccgctgggaacagtggcataagcgaagcatttggcaacgcacgctcgaaccgcagccatccaacactcgggccagtacctgggagtttaggttatagtcctgcaccagctttctacaacagttcctccttaccggtgtcaaaagtgcttatgacttaacagaggggaggagccacctccaagaacaattggctcacaggcactgggcagaaggcagggcagcctgggagctgggagcagccagggcagcccccacccagttctcaagtgttttgatcagaagtagaagcccggagcagagagcaaagt

SEQ ID NO: 70075 - DNA, 1301 bp, Homo sapiens
aactgattctaataacaattacgtctctctcaatattccatgaaaaatctcatcccaagtcctttggctagaaaaacatgctggccacacaaccagagggcgcaggccgcgttcccagcatccacccccaaggtgagtgacctgggagtggaatcctgcactcccacatttcctgggaaatggggcaaggaaacaagccttcacgggccgtcttggcctatgcagaggctgggtcgtggcctaaggaggagaggaaacgtttcaccagccccaggtgactcacagggccttcaccaacctgaatcacccctgaacaaagctctgcctgcgtctgggcaactgaacgaggtcccacccctgctccctggacttgccacaccatgtctctactttacaatctcgaaggctgcctcctccaggaagccttctcagactcccccctgccttctccctgggtttccagcatcggtatctggtgggagaccatcagctcccagaaacaagggcctatgtttcttttccctccatattcctagcacccagccagtgccttatacctagaatcagttcctcctagtaggagtcactgctgaatgactatgaatctgatgggtggacagatgaaggacgaaaggaacccaatggtttcaagatggctgatgtcaagagctcactaggcaacatgatggcaggttgcctggctagctggttccccagagggcactactcagacaggcacagcagtgcctggattcacgctggggccagggtctttccacctgctctcccttaggaccaaccacattcatttgaaaaatggccagtggggttaaaggtgaagtcagtagccaaggcatcaatgctgacctggcaaccccgctgtgggttgccaactgctgtacgggagatcccattctgctgcagcccaacgttctctctgcccattgaatgaatgctcagccactggtgagggtggaggcctcaaggaccagcccaaccactcaccgccaagtgaggaaacacaagtcctggagtgcagggcgtctccaaggccacagagtcaggagctggagcacccaagtttgaatccctgcacagtctccccatctgcaaaatgaggataagttcctaccttatggaaaccagggaagaattaaatgagataatccatgtaaaagccctagcatggccaggtgtaggtgcagtggtggctcacgcctataatcccggcacattgagaggccaaggtgggaggatcacctgaggccagaagcttgagaccaacctggacaacacagtga

SEQ ID NO: 70076 - DNA, 536 bp, Homo sapiens
gaggcagagaattgcttgagcccaggaatttgaggctgcagtgagctatgatcatgctactgcactatagcctgggcaacagagcaagaccctgcttcaaaacgaaatcaaaaaacaaaaaggaaatcaaacctcccctcacccagagccagagttggaagtaaggtctccagtcacccaagtccagtgctcttcctgtatcaccctttggctatctcccagaccacaggaaaccatgtgtttgaactgaaaccacagtctgcacaccttctgtcccagccggggccctgtgaagaggttactcagcagaagttcatcaccaagtgcatccaaaagcatcagcagatgggcctcatagccacttgtgaataggcagtccacaaccacagtccacaaccacaatacacgcataccttgttgtgcacagaggcagaaagaacaccgagctagaagccaggaaaacaatctgtcccccagcctcatccccaccccctcaacctgataacctagggagttaagactgatcatttatatta

SEQ ID NO: 70077 - DNA, 5270 bp, Homo sapiens
aaaaaaaaaaaaaaaaatatatatatatatatatatatatatatatatatatatatacagccactacatattaggccatgtacataccttatttctttcagttcatgcatctaaccccacagggtaggatcttgattcccatattatacataagcacatccaagctgtgaggctatgtgacttgcctaaggtcacaaagctattaagtagcatggtcaggatttgaactcggcctgtttccaaagctcacgttctttccactaccccactcttcccagctctaagagtgggattcagtaagccacagcagcagcactgccagggctccattcttttgtcagcagaggactccagcccagggtctcagcacaccaagggttaaggctgagaggcagtgactctctggggctgcacaaagggaaatgcacttcctgccccagcaggcagagatgctgttttatgctcagtaaattaggacgtttgtttaattacgacgacacacagattttgttattctaaatatttttggaacatgatgcttgggaggaagctgtcaaggcacgggtttttttttttctctctctctctttttcctttgctttgggtttctctttctccccctccaagagaagggtagggccaggctcagaggaaaacaacagccaacccctcctctccttttgaaataaagatgtcaagctggtaagggctgtcttaagtactttattgaagaattagctagaagaggaagtaaaggaagaacagccagcctggtttctagcaataccctaccaggctacacaacaatgctgcatttttttagtgtgtttttcttcttttaaagagctaacagatccttgttttgttttttctggagcaagagcgggcaaaaggcaggctgtgattaacatgcgtccttcatcctacgagagagaagttgtcccatctccaaccccttaggttaaaaagtttaaaaataaaagcaagaaagccagggccctccctctcctctaccctcctgaacctttcagatgaacagcctcaccgaatgctgcccttctctccggggctggggagctccccagagcctgccaatgccggctctccagacacctggctctgcccacctgcgctgccagggtttgctgagtgtggagactgaagttctttggtgtcaccccacagtcatccagagcgcagtggctctcaaattacactgagcaatctctccatgtttttaattaccccccaattatccactaagtggctcctcactttccaacaccgcatgcttgcctcagtttgccaaacctgcaatgtgcttctcccttgtagcagcctcctccttgcccaagagaagtggcccctctcagccttgaaattcctgagtcctttgtctatggcatacttgggacacacatcacaggctgcctttgtatttcactggttctgccactttccccttgaggactgtaaactccccaagggcagaggcagggccccggggatttcacagggcagtctggctcccttctcccaatccccatgactcacagtacctttccggggtccctgtcatctctacctcacgttagactcatctacagatttgtctcagttctcccctaagtgcccatgggcacgggccaggtcttactcaacctcccacccccccaccacctggcagagtccctggcacagagagggcagttaaatatttgctcaattacacatctgtgtccccttcccccacacatagcagccttgtatataaactgactattattaattgagtgattgtctcaaaaggcctccctccttaccaaaaagggactcctaagccatcaggtgagccaaacactggcccagacagtgtagttagaatggccacagtgctgcgctgcacggagaaggagctaaggctctcttccctttccacggttactcatcagtcactttgaaatcctgttaaacccagaaaagggcgcagtgaaccgagaagtggctgggcctctcaactgcccggtggagacagccgcctgcctctacgacctgggacttcccaaggagtcttctctccacaccggctgggtggggccgtgcgctcaccctgccccccaccacaggacagccggcaagctagtgctgggggtgctgagtctcagtttgaaacagcggggcttccctggagaatgagggtgccgcagtcctgtctcctgtgcgtggccccagaacaggatggggtgaggaccccagcacagggaagcgggtgcgtggagtggagaatagaaaactccgatttggctcaaacaggaaagatgcaatcgcccaggcctgctcgtaacggcagagctagctgcccccgcaccccgcccagacgggatggcccctgggtgcggtggaatcaggtgcacgcctgggcggccccgacggctgctgcattccgggcctccctcccccgaggatcagaagtcggaggtcgagggctggagcagggactgggggtggcccttcctgtctcgcgcccgggtccccgccgggtcccccttgtccgggcagccgccgcacctcccccgggccctccccgaccagtccgacggcagcgggcgaatgaggaagtcggccgcggaggcggaaaccgggccgggtgcaaggtctgcagcgggacggtccgactctgactcaggaggacgccctgacagctgccaaacggtgcccgctgcccgttacctccgtgcctcagacgccagaaacttccacgggagcggctgccccgggctcccaacccgtgaggctgcgtcccaggggccgcggctcccggaaggggttaaaaagtttgcccgagtcgggcctgggcgaggcgagggcggggcgcgtgccccagcggctgggggaggtcggctccagtgcccagtcctgagaccgcgccgggggacacggggggcgccggggagcgccgggtcccgaggccgcccctgcacccctaggcctcgctgctgccggcgccctccccgagcgcccgcgtgggggtcccggtccccctgggaaggatgcggtgccgggccctgagccgccggcgttcgcccccgcccgcgcgggtggcgggccgcactgagcccaagaaccaccagtcggcctggcggcagcgcgtctcgcccccgcccgcccgccgccgcctgcccggggcgggaccgcggtggggctcgctcacctgaacctggatctgccccgggaacaggcgctgcttctcccgagaggactttctcgagcgctcgggcggcggccgggtggggcgagcgcacgaggcgggagctgcagcaggtcagccttgcttagccttccgtgccctgcccaggaaccgcggtgatctgcgcgcctcaccgcacccagctcggctcctcgccgccttcccgccccgccctcggagccgcgggaccattcccagccgggagccggctccggggcggagcctggggcacaatcccgcccccttcctgctacacccactgcaggccgcgcctggccttgatgggcagacgtattggcctgtggaaagggggtgggcggagcctctgcggccagatgggtggggattcaacatcctctttccgccccacctccacccgctccaccttcccccgcgcttcctaggcgggagccccgccctctagggcgggtccaacggacagccaggttctaggacaaggattgacacagggggaatccaatcaggaggcggcgactcggggcgcggagagctccgggccggggttttggtgccttgcctgggccggggcgaggccctgcgggagccgactgggaaggtctggaactctgacaccccgccccgcgagctgtgctctcagtctcatgtcatcccaccacaaggacagatattaagtaccatatatgggaaaaatgctattttacataattatgatccctgtgggggcgggcatggactcagccctggattccattgtgagcgtcttgagttcgattcctgaccctgcctctttaggatccgcacgttgctgcctttcagcctccaaaccttcgctctggccgttctctccacctggaatacccttccgagcctctcttcacctccatgtcattaactcgcatacatcctttcaggtacttgttacaaattgcactttttttttgttactgtccactacaagaggataaaaaatgttttcatttttaaatgaaaaatcttttgatccatttggaatttatttttggggtaaggaagaaacctaagataatttttgtaatagccacttgtccaaacactgttttctccactgattttagttggcaccttcatcgcctatagaactattatacttgaagctgtttctgacttgtatacattgatctctctgtgtgcacctgtgccaatcccaccatgctttaatgaagatacctttataatacattctatatctatgagggcaaatttctcatcattactctttcttactggaatgtgcttgctatcatgactattcttccaaattaacttcagaaaaaagctatgttctaaaggcaaaagaaagctgggaaaaaaagattttgcaactctgtgacaaattactatcagcaatatataaagatctcttcccagttgataagaaaaacctcggccgggcgcgtggctcatgcctgtaatcccaacattttgggaggccgaggcgggcggatcacctgaggttgggagttcaagggcagcctgaccaacgtggagaaaccccgtctctactaaaaatacaaaataattagccgggcatggtggcccatgcttgtaatcccagttactcaggaggctgaggcaggagaatcgcttgaacccgggaggcggaggttgcagtgagcagagatcgtaccactgcactctagcctgggcaacaagagcataactccgcctcaaaaaaaaaaaaaacaaagaaaaagaaaaagaaaaacctcaaagactccaaaataaaaatggccaaaaacaggaacaggtgattttaaagaagaattataaatggccaataattatttttaaaaagccataagaaatgcaaacaaaacaacataaaatgccattttcacctaattaaaaaaaaaatgctcaatattggtcaggtttatagatacagatgagaaagtaaattgatcaattctatctgagaattcatcttaaaagacattagaaaagtacacagatatgaactttaaagttctttgcagccgggcgcggtggctcacgcctgtaa

SEQ ID NO: 70078 - DNA, 2161 bp, Homo sapiens
tcacccaggctggagctgcagtggcctgatcatggctcactcttactgcagcctcaacctcctggactcaagcaatctcccacctcagcatctcgagtagctgagactacagggactcaccaccatgccccactaatttttttttctttttttccttgttttgtttgttcctttgttttctttttctttttccctcctagtactggccttgcagagcagggctaccctataggcagtgtgcccagagtagcacctggccaatttttgtattttattgtagagatgggaggaggtctcacttttttgcccaggctggtcttcaactcctgggcttaagccatccttccacctcggccctccaaaatgctggggattacaggcgtaaagccaccacgcccggctgtattgcctattaaagtaaatccatttttaatgtgaaaaattatgctataaattcaaatatagatacaaaagaatacatgctcattttaaaagttagaaaacattaaaaagaataacaaaacacctttgttacctgtagttctactctcaagttcaagatttttggcgtgtttccctattgtttaactgccttctccttaaatccagcacacagtgtctagccccgctcccaccatcctggttcttgccaaacctgtctgcatgcctgacttcctgctccattcaggtttccagcctctctctgtcaaccacactcatgcgcagtccttctcctccctcttccctggctcccaggacccatcactcctcgccaccatcttacccagccatcctgtcctccccagcactcttgtcccactctgatacttgccctcctttcctcccctccacaccatgaccttagcttctcaacaaggccctcccccactgtctcttccaactgccacctgtatcttctgcatcctcagttaatggtcctgaagcccagctgtaagcatcagcttggcacaaacttacggagttgttcttctgtttgttcatttgtttgctttttgagacgagtttcgctcttgtcacccaggctggagtccaatggcgtgatctcggctcactgcaacctctgcctcctgggttcaagcgattcttctacctcagctgggattctcctacctagtagctgggattacaagcacgtgccaccacacctggctaacttttgtatttttagtaaagacggggttttgccctgttggccaggctgatcttgaactcctgacctcaggaggcagaggttgcaatgagccgagatcatgccactgcactctagcctgggcaacagagtgagagactccatctcaaataattaattaaaataaaataaggttgatgataatccctacaaaactgggttgttgtgggaattaaatgacttaactaaatgtcaagcaccaacaacagggccagcacagagtaagtgccaagtggtatttgctatgatgatgtcatgatgattatgcgtctttctatcttatctcctctcagaggttcatttttcattccccagatatttcctgagggcttgtgatttgccagatcctgtaccaggtgctggaacttggtgatagacaatccacagtctctgctctgaagacatccatgcaggtactaacaggtcagcctggtaaatcctgcgaaggcttcagcacagggtgctgttggggaaagaggagatggggtgtgtagggtaagggggaatagcagctcattccagacaggaaaaactgggtgcgtagcccagaggggagaagacagtctgtgcacaagctcagtgaaaggggagggaatgtcaagaaggcagcaggagttggaaggggcaaggccctgcagcagatatgcagtcctgggaccctcagcatcacagcagcaacctcacctggagcctttagaaatgcagtctcagctggacatggtggctcatgcctgtaatcccagcactttaggaggccgaggcgggcggatcacgaggtcaggagtttgagaccagcctggccaatatggtgaaaccctgtctctactaaaaatacaaaaaaactagctgggtgtggtagcgggcgcctgtagtcccagctactcgggaggctgaggcaggagaatggagtgaacccgggaggcggagcttgcagtgagccgagatcgcgcc

SEQ ID NO: 70079 - DNA, 1607 bp, Homo sapiens
aaaaaaaaaattatccaggcatggtggtgtcacatgcctgtagttccagctactcagaaagctgaggtggaaggatcacctgggcctgagagattgaggctgcagtgagccatgatcaggccactgcacagtctcaaaaaaaaaaaaaaagaaagaaaacaaatgcagagtctgaagatccagcccagacccactgattctgaatctgcatgttaacaagcccccaggtggctggcatcatattaaagtgttcaaagcactggcttaatcagaaagtgtcttgtggttgtgctgaggagtttttaatgcatcagacatcagaatctctagggaggtttttttttaaattttattttaagaggcagggtcccactccgtcgcccaggttggagtgcagtggcgcagtcatagcacactgcaaccttaaattcctgggctcaaggaatcctcccacctcagcctcccaggaagctaagactacaggcacatgccatcatacccagctcattgttttatttttttgtagagaatgggtcttgctttgttgcctggtctggtctcaaactcccgggctcaagcagtccctctccctcagcctctaaagtgctgggattacacacatgagccaccgtgcccaaccacctagggagattttaattaaaccagtacctcaggtggtgagtcctgaacacccacatttcataccattcattcagcaaatgatcactgagcaccaggtctgtgccctccacctgaaggaccacacctcctccttccctggatgggcgctcagggccccctctctagcgtgcactcaacaaacattccaggaatctgatgcaatggttcccgtgcctgattcacaacactgtccatctagggctcaccctggtctgcataccattaacacttccccactgccccttgagtctttgagtgtggtaactccttctggaggcctctctggatcctgcagcctggcatggatgttctcctctgtggtcccattgtacttggggttgcttctgttttatgtttttttgagacacgctctcactctcttgcccagactggagtgtagtcacgtgatcttggctcactggagccttaacctcacaggttcaagtgatcctcctgcctcagcctcccaggtagctgggactatagacacgtgctactacagtcagctaatttatttttcgtagagatggggtctttctatacggcccatgctgatctcaaactcttagcctcaaacaatcttcctgcctcagcctccaaaagtgcttggattagagtcaaggccaccccacctggccttagggttgcttctgtcgtagcattctcatgctgtcagcttgcctacccctggacaaggaggtcatgagcttcctaaagacagacgagtgctttatgcttatatcccaagtacatggcacggaacctagcactctgcaagaccctcaataaatgtccatggcatgaataaacaaataagctactaaattgaaataagaatctatgtgggctgggcacggtggctcacagctgtaatcccagcactttgggaggcctaggcaggcagatcatttgatcccgagtagctg

SEQ ID NO: 70080 - DNA, 1267 bp, Homo sapiens
ggtatcactctattgcccaggctggagtgcagtggtgcaatctcagctcactgcaacctccgcctcccaggttcaagcgattctcttgcctcagccgcccaagcagctgggattagaggcgcgcaccgccatgcccggctaattttttttagtagagacaggggttcgccatgttggccaggctggtctcgaactcctggcctcaagtgatccgccagcctcggcctcccagagtgctgggattacaggcgtgggccaccgcgcccggccttttaatgtataatagccttttaataggctcccatgattcagttggggcataaaagattttacaatgaaaatctcctttccacttgtattctcacggcccccgccagggaaatttgcccacccggagaagtaaccaacgtccttatgttttgtgtcctgctccagccgattcatgtttacagcgagtccctcacacccgccgtttcaggttacatacacgggcggtgcagcggagagcgcggcggcgaagtttcaggcccctgcccagccccactcgccgcagccaggtagcccctccacccttcctgcccggaagtcctgcgcgctccacccaaggacaggtgggttagccagggcacgcccacttccgtctcattagcctatcgaatacgttatgcaaattgacacacgaccccgcgcctcacgacaaccaatggttgcggaggcgccgcaggtcgcccaggttcccgttctcaggatgctctgggagctctgccacgtttctgctgtggcaggaagaactgaaattccagaagccggagaaacaagccgccgtcaagactgctgaagcgaggcctacggccctgtaatcacacaagctcaggcttcacggaagctggaggccatgtcgcctgatccccgggctgaccccttccctccctccgcgtagttcctgccaagctccaggtgcccggtgcccacgtagtctcggtgaacgcagagaaatcactgcagatgtagccacgcttctctgagttaaggactcggcgtccgcaggagagccaaggcctcgctgctgggggtcagagcctctcagagaacaagaggcaagtccaagttctgcctccaccacttgttagctatgcgactttgggcaatccgcgtcacctttccaagcctcattttcctcatctggaaaataggaataataacactgccctcccagctacgatatgaggaccaatggctagtcaaatggaaaacacgagggtctttg

SEQ ID NO: 70081 - DNA, 1264 bp, Homo sapiens
acagaagaacagaagagaaagggcaccccacacacatccattcctctcttcctccgttaaaccggagccaggggctggggctgggtgtgtgtgctcctgccttcccaggctcttgcttgttttcaaaggaccagagaaatgtctggaggactgctgcttcagtccacgtgaccaggatgaaagtcattaacaaaaggccaatgtttggggaagagcctttgccctcctttcagggcctcagctggggctcagggagataaggcgggagcaaaaataaaactgaaaatgtgtttactctgagatgaaagtgcattgctaaacgctagccgcgaggacttgtatacaaaaaccacatgtctgggggtgttctggaatgtcacaaactgcaatggcaagaaaaggcagcaggcaggaccaggactctgctccgtgggagccccctctggtgccctggctctgtcacctcctagggtctgtgatctctcaaaccggacctcagacagcctgagcagcccacccagccacgtgagccaccgtgcccagcctgatttctttctttcttttgttttctttcactttttaaacagagaccagcaggccaggtgcggtgcctcacgcctataatcccagcactttgggaggctgaggcaggtggatcacctgaggtcaggagtttgagactagcctggccaagatggtgaaaccccatctctactaaaaatacaaaaaattagctgggcgtggtggcgggtgcctgtagtcccagccactcgggaggctgagccgagatcgcaccactgcactccagcctgggagacagaatgagactccgcctcaaaaaaaaaaaaaaaaattagcctggcgtggtggtgggtgcctataatcccagctactcgagagtctggggcaggagaattgcttgaacccgggaggcaaaggttgcagtgagctgagatagcgtcattgcactccagcctgggcaacagagcgatactccgtctcaaaaaaaaaaaaaaaaaaagccatgagtgagttactcttgcgagcagccctctcgagctggagtttgactcctggaagatgggatgccactgtgactgagcaaacataggaatagctgttccactaaagtctcacaaagccactggccggaggaatttctctagggactcccaggagcagctgaggaaacatgaaggagtggacattcccagaagccaaagaaaagtcgtttggttacagagactggtgtctgtgttcttct

SEQ ID NO: 70082 - DNA, 1013 bp, Homo sapiens
ccaacatggtgaaatcccgtctctactaaaaatactgggcatggtggcgtgtgcctgtaatctcagctactagggaggctgaggcaagaccatcgcttgaaccagggagttggaggttgcaaagcgatactctgtctcaaaaaaaaagaagagtataggaagtatgttaagtataagcaactggaaacatgggctgcttcttggaagaggacctaggtggcaggaacaagacagggtagaagactttgtcttactgtgcccgctttgtaccttttgaattttgtaccatgtaactatttcatgcaggcaaaaaaatgaataacataattaggctcttttgtcctgaccccactccctgaatccttaacctcctgcattttagaaatactccagagcttgtcttattcttaccaaaattcctgtaggcctttgactcctgactcaccctgtctgcagtgtcccccagcctgcaggggtgggtgagtcacagcaaccctcagccaccagctgttttccatctgccggccttcctgggggagagtcccttccagctgtagcccctgtctatgggaaaagtctcatgtccttttcatctctccccactgcacactgtctctcaccctagactataattcaagtgaatttgacctccatttattggacaagccaggcactgtgctaggaataatgaaaaccattagacaaatctgaaagggagggatcactagactaaggggtagaaatgtggagatgggagtaactttctgcatgtctttgcaggaggtggcatgtgagaaggcttcttggaagaggtggcacctgagctgtggagggaacagcactccaaagggtagtctagagggaccagcgtgagcaagagcctagagtaaaaaagatgaggttggggctgggtgcggtggctcacgcctgtaatcccagcactttgggagtctgaggtgggtggatcacttgaggtcaggagttcaagaccagtctggccaaaatggtgaaac

SEQ ID NO: 70083 - DNA, 2746 bp, Homo sapiens
agaatcactggagcccaggaggttgaggcaccactgaactccagcctgggtgagagtgagatcctgtctctttaaaaaagaaaaaacaaaaaaagcaaactgtctcatgaaactcttgtttccatgttgcacgctctgccaggttgtgatgtaatgtatttcttactctgggtcacagtcacaaaaccttgaaatgtcactcactgtcttggctcatgcgtcgtaagcctttgttccccaacagggggaagtgaaccagcacacaaggcccttccgtcctgcggagctcactgccttcctcagctcctggcccgcacttccgaccacacactggggacacaccctcgggggggccccaccccagcagctgcccatgttcacacctcttcagttatttcaaactccgcctctctcggcctgatgcccaacacttccttcacccaaggaggtcctgttcaaatatcacttctggccaggcgcggtggctcaggtctataatcccagcacttcgggaggccccgaggcaggcagatcacctgaggtcaggagtttgagaccagcctggccaacaggtgaaaccccgtctctactaaaaatacaaaaattagccaggtgtggtggcacgtgcctgtagtcccagctactcaggaggctgaagcaggagaattgcttgaacctgggaagcggaggttgcagtgagccaagattgagccattgcactgcggcgtgggaggcagaggtagactctgtctcaaaaaaaaaaaaagtcactttctctgccagtcatatcttctgcaaccctgaggagccaggcaggacgacccctttaccctctgaatcaattggtctgtatcagggtctggcagagggaggggaagttggcccctctgatttaatggatgaatcaagaaaatgtgtgactgagccatggattcatggggatggggtcctggagcagaggcttgctgtgcacctactaggtgctgtgtacctcacaagccactggggacatcagaccaccagaataagtccactttccccaaggaaagtggtcaaatgtgggagccaggtgtgcaaatccccaccccagggtgataacagccccaataaaggcacatgcaagggggaccttcggagctgatgacactgtacaggcatctaagaggctggtgacagggtcaccaagcagaggtctagagcagggctgagtggggtagggggggttcttccaggcaaaaggcaaaaactctgttggtaccgtgtaggtcttccacagcacatgccacatgagaagaaacattcgcctggcgagtggctgaagtctataatcccagcactttgggaggctgaggcaggtggatcgcttgagccaaagagtttgagatcagcctgggcaacatggcaaaaccccgtctctacaaaaaatacaaaaattagccaggtgtggtaacccatgcctgtggtcccagctactcgggaggctgaggtgggaggattgcttaagcctaggaggtcaaggctgcagtgagccatgattgtgccaccacactccagcctcagtgacagagtgagaccctgtctcgaaaaaaaaaaaaaaaaaagagagggaaaggaaaaattttattttacatttatgtattgagggcagggaccatgcctgctgggctgctcaccactgctgagcaggattcctggtgtggcatcctaacacaataaatatttactgaatgtgtactcaggaaactgcaaagggttcaggctggcctgagagtaaagtgaaagaaggaagtggtagaagagcccagaggtctgtgaccccagaacctggagggcacctgtggcctgggtctttctcctgcaggcactggggaaaagtcggagggtttattttatttaattaacttatttattaatcaattaattttttgagatggagtctcactctgtcacccaagctggagtgcagtggtgcgatctcagctcactgcaacctctgcccaccgggttcaagcgattttcctgcctcccgagtagctgggattacaggcattcgccaccatgcccggctaatttttgtatttttagtagagatggggtttcaccaggctggccaagctggtctcgaactcctgacctcaagtgatcctcctgcctcggcctcccaaagtcctgggattacaggtgtgagccaccgcgccaggccggtaggagggtttaaacaggaaagagataagcagtcagattcatagtttagaaaatcctcaggttctggtgttcgggtggatgcctggagtggggatctggaaatcaggggcaggggttagtaataacccaggtgaggagacttgagtctagaggcagccaagtggggacctatggaggagttcacgtgctgcaggtgtgcgccgccgaggcggagccaggctctggagctgccaggggctcagaagcctccctctcagatctctccccttttggccacagatgggaaggagagaggcactcacccgacccagcgtggcagtacagtagtgtccaacctgtcactgttgggcgtggtggcgtgtacctgtagtcccagctactgaggaggctgagatggcagcagcacttgagcccaggagttggaggctgcagtgagccgacagcgccactgaactctagcctgggtgacagagcgagaccctgtctctaaaaaacagaaaagaaaaattacaggtcgggcgcagtggctcacgcctgtaat

SEQ ID NO: 70084 - DNA, 1722 bp, Homo sapiens
tcaagaccagcctggccaatatggcgaaaccccgtctctactaaaaatacaaaaattagccaggcgtggtggtgtgcgcctgtagtttcagctacttgggaggctgaggcaggagaatagcttgaacccgggaggcggaggttgcagtgagccgagatcacgccactgcactccagcctggcaacagagcgagactctgtctcaaaaaaaaaaaaaaaaaaaaaaaaaaaagaaaaagaagaaaaagaaaaaagagaaagaaggaaagaattacataacagtaagcaacctagctagatttgaaccaggccctgcagttctaaagcactggcttttgcggagcggcactcactccgcatcgtggcataggtagatttcttttctaaaggtgaggtcagtgctgggcacttagcaggcgcccggtgggctgcgccgtcctggaggaaggctgattcctcccaccccgactcctggctcgtgggtgggtaatccagcacattctccccaccccggcaaccaactttgtggccgaacaagccctccccggcttgttccgctggtcccaggcgcctgcgcatccggacacgatgaggagcaggtgcgcggggccggggtgtgttcgagggggtcgtgcgcgcctgggctgcctccccgcggacggcggactgggccggggcggcgcttcctggcagagaggcgcggaggggcgtggctttggagaggtgcccccggcgggctggcggcctggctgcggtgaaaggcgggcggacgcaggtgacgacaaccgctccataaagggcgccgcggcgcgacgctcgccttatatgggcaggctcggcgcgggaggggcggggcgttccacccagctggctccgcaccgaggcccggccgaacccccgaggggggaaacttctctgcgagggtggagcctcctcagcggcgtccccaggtcccgagaggggtccctacccaggctaagactcacgacgggctccaccctgcaggggctcaacttgcagaaaccctggggcctgccttccccaggggtctgccctcctcaggccctgctagggcactgactcggtttgtgctgtgtggcgttttttccttcaccccacctgggccgcaggtcctcgctagatagccgagggagggtcctttaagtgagctcacctcggagcccccagataaccaagcctgagcctcccggctacatggcgaggcttccccaatccggtcagccccaagcaggtgcctttctctaactggcacaaaggaagtctcctagccaggctgagcccaagcctcggtaaacatgagccttggatccactggaagtgtttggctaactgggcccttcttggccagacaagactttaaccctaagaggaagctgccagcatgacgcagcccaccatattctccctccaagctctcttcatagcccgggtccttaaaaacccaaatctgtccaattgctacttgccgtccactcgttgacagttactccgcttcacagcctcccgatcacctgagtgtcctccctcggctcagtgcacagggctctgtgagcttacagttccctggttgccgttccgtgcctcccagccctgcacctgctgctcctttctggaaagccctttccttgcacactcccagacacgtgctcacccttcagagagatacttcttagcgtcttcttcctgacatttgtagtgatta

SEQ ID NO: 70085 - DNA, 9012 bp, Homo sapiens
ccgagcctcccctcccacaaagtaaaccggcaggtgggcagtgcaggcggggcccagctcgggtttcactccttccccgctctcggggacaataaaatgctccctttgccctggaaatcccacttgtataaaatccaaaagaagaaataagctcttatgttcaaacaggtttgttccaacctcatttataatggaaaaatattaactgaaaaattccttagtatccgacaatgggggagaagttaacagtttgaccggagctgagtgacatgcaaaagggtgtttgtggagtgcagggagctcctgctgtgtgtgtgggagggtggagagggcatggggagaggagcagggaccccagagtcagactgtctaggtttaaatcctgtctgctccttcctagctgtgtgaccttgagtcataacccaaagccctctgtacctccatgtccccctccataaactggcactgggctgggcatggtggcttatgcctgtaatcccagcattttgggagaccaaggcaggtggatcacctgaggtcaggagttagagaccagcctggccaacatggtgaaaccccgtctctactaaaaatacaaaaattagccaggtgtagtggcaggtgcctgtagtcccagctactcaggaggctgaggcaggagaatcgcttgaacccaggaggcagaggttgcagtgggccgagattgtgccactgtgctccagcctgggtaataggtgacagagcgagactccgtctcaaaacaaaacaaaacaaaaaaaaggagagagagacttgggggatgtgtgtgcccagaggaaaatccatgtgaggacccagcaagaaggtggccacccgcaagccaagcagagaggcttcaggagaaaccaaccctgccagcaccttgattttggacttccagccccagaactgtgaaaaaataaacatctgttgtttaaaccacccagtctgtgatattttgtgatggctggcctagcaaactaatacacattactaacacacaataagagaagcgtttaatagggcgcttaccacgtaattgcattgtgttctgacattacatttacgatctcataaccatgaggagggtcctgtcctcccatttcagagatgaaggaaactgaggcttggctagtgacggagagggctgtgactggagccaggactgtgtgactccaaggccccaccaaagcctcctcctgggatggaccatggactttcctgcctctgtgctgtgcatacgctctcccttctgcctggaatacccttcccaccacttgcctctcaggacgagtcccagtcgattcttcaaaactcttcttggcccggcaaggtggctcacacctgtaatcccagcactttggaaggccaaagtgggtggatcacttgaggttaggagtttgagaccggcctggccaacatggtgaaaccctgtctctactaaaaatacaaaaattagctgggccttgtggcaggtgcctgcaatcccagctattcaggaggctgaggcaggagaattgcttgaacctgggaggtggaggttgcagtgagccaagatcacaccactgcactccagcctgtgcaacagagttagactgtctcaaaacaaaaacaaaaaacaacttttctcaagcatcacctccttcccatgctttacccgacaatctccttttgcagatgtgctgcttttcagggcttgcggccagtctgtactctgtcaccatggtggtaaatgtcatctctcctgtagcatttagactttagatgtgtccatgtgtttgctgtgaactcctggaaggcaggggctgtgtcttgctctagttcctatcacccagcaggcccagaggggctccgcacagacgcttgctggctgaggtagccagtttggcctggagagagtattcccgcctcaggagtggatcatgaggaaatggaatctcctgcctccttgtggggtgggggttgggggaggtggataaaagagaggctccacctggcacggtggctcgtgcccataatcccagcactttgggaggccgaggtgggtagatcacctgaggtcaggattttgagaccagcctggccaacatggtgaaaccccatctctactaaaaatacaaaaattagctgggcacctgtaatcccagctactcgggaggctgaggctggacaatcgcttgaatccaggaggtggagcttgcagtgagccaagattgtgccactgcactccagcctgggggaaaagagcaaaattccatctaaaaaaaaaaaaaagcggatcaaggtccctactctgggcatgagaggagggatcctttgacactcctgggagcagcagtgtggcagaggaggaggagcagggcatggggtcagccaccctcagtccatttcccagggtgtggccttaggcacggtcactacctctctgggcttctgtctccacatgtatgaaatggaatcagtccctccttccacaggtgttaggtcgaagaaggcacctctggtggtatcggcacagaggctggacactggatgacttctttgctgggacactgaggtagggggcagaccagagacagacagctacttgcctaagctcacccagcaagctggctgaaggtggagaactggcttgtcctccagttggtagttaacagctgtctagcaggagtgttcttgctcccaggagacgctccgttggctgccacagaggtaagcgtgagagtgcgctcagaagtggctgggaggcatggagaacagaggagcaggttcagggtgaattccagtgggcattctccaagggtgaggtcactgcctccaactccctagggctgcctgagacacaggcaccaccaagccagctccagagcaggaggaggtggtggcagggaccagggccaggtcacagggctgaatgtaaggccctcagcctggtacagcgacgggcccctcccatggtgctggggtccttaccttgggaagcccggtgtttcctgtttaagatgtggctgggggtaggggaaaggagaaagccacacagataacacttctggaacttccaatcggtgccagcgtgcttccacctgctgagccgtgacctcatttgcagggactgtcatgagccccaacttggagatggtgcaactggggctcaaaatggtgaaaaccttgtcccaaaaggaaagcagtatagctaatgagcaagaacaaagagaatttgaaattaaagacattggggttcattcttttccccttttttaaaatttatttttgggccgggcacggtggctcacgcctgtaatcccagcactttgggacgctgaggtgggcggatcatttgaggtcaggagtttgagaccagcctggccaacatggtgaaaccctgtttctactaaaaatacaaaaattaaccaggcatggtggcaaatgcctgtaatcccagctactcgggaggctgaggcaggagagctgcttgaactcaggaggcgaaggaggttgcagtgggcagagatcatgccattctactccagcctgggcaacagagcaagattccatctcaaaaacaataaaataaataaataaaatttattttttatatttttattttttagaacaagatctcactctgtcacccaggctggagtgcagtggtgagatcacagctcactatagcctcaaactcctgggctcaagtgatcctcccacctcaccctcccaagtagctgggactacaggcgcacaccgccatgccaggctaatttttttttaaattttgtgtaaagacagggtcttgctatgttgcccaggttggtcccgaactcctaggctcaaacgatcctcttgccttggcctcccaaagtgctgggattacaggcgtgagccatcgtgtccggccacatcggagttcaaatctgagctctgaactccattcatgccaagttacttaagccctccaagcctcagtttccttgtctgtaaaatggcggtaacaatggtccctgctgttggggttgcggtggagactcagtgagaggattcatgtagcacacactcagtaagtgccagctgtcactgccagcctatttcaccaccgtgaacacagagcctcagaatggaaaagcagcctgcccaaggtcgcacaacttgcaggtggcacaggcaggatctgaatccagatcagattcttcccgccctacttctatcaccgtggaagggcctgggggggcctgcagccaggaggtggctggaaagggaggttccttggaacaaccagtggcccaggcttcctgcagagccggggaccccagccctggccagggtaagggtcacgcctgcagctggtgttccaggcatcggagaggaactgcggctgcaggcctggcagccttaccgtcgccagcatcctgccctccatggacacggccccaacattgttttctgggccgttccctgcccagagcccacacattcgggatttccgcagcttggccagcactaccttcgcttcctggagcagctttccccaggcggccggggtgggggttgagctggccctggcccctggtaggggcaggcactgctcggaaggcagtggcagcagcgccgtcaacatcctcttgacctgacaggtccttacccgagttctacctcctcagaaacacagcggccctcctcactcccctctcctgaggccagcgtagaaaaggccctacctcatttccactttagggtaggctggagtgagagcccgggttaaaatcctagccctactacaaaggtgctgtgacctgggcaagcctccccttccctctgcctcacaagggatgctgggtagcctgaggtgccttaggctgccctgacatcagctcagggatgaccggcgccccgtgctctgaggtctctgggcataataagctccttgatgacagggtcagtttctctcccgtgttctgcaagtttatttttattattattattatttttgagatggagtcttgctctgttgcccagactagagtgcaatggtgtgttctcatctcaccgcaacctctgcctcccaggttcaagcgattctcctgcctcagcctcccaagtagctgcgattacaggcgtgcactgccacgcccggcaaatttttgtatttttagtagaaaaggggtttcgccatgttggccaggctggtctcgaactcctgacctcaggtgatccacccgcctcggcttcccaaagtcctgggattacaggcgtgagccaccgcgcccggctccatgttctgtatatttagaaggaacctgtgtgagtggccaccaaacgttcactctgaaccatgctggcgctgcctgcaggtgagcgtgcctgcccagagtggtgtctcagttgtctcactgcccaccctggcgctccgtctcctctgtgggctggcacctgctccctggtagggcggagctgaggggcacaagggagcgtggaagtcaagcagccagcccagcaaactcgagcttccacccctgccgcctctctgcaggcaaccacgtgcactgggtgtcaagaaaaaatatacaggggccatatcccgggttgtcttcaggctcgggaagcctgcgactttgtcccctttccccggcttcccaacctggtggctaaaggcttccagcaggtgtctgccaaccccatccacagtcatggggcccaatgtggcacccagagaatgaccgtgggctgacagcccagagccagcggcatccccggtgaggtcagtgtcctggaattggtcaaacaggatcaccaggaggattccgtgagcacagccagcatgactcacggccatgatcagcctcacgggcagaggctgccaacctgggatggccacagccaccggctcaccttgcagggcaacgcaccttttaaggagggagctggagcagcgcccgggtcctgcctctggccaaggcctctgccacacttctccacgcccacccgggcagagaggccagacccccactgggttcaaatttggcaccacttttcagacatgaccttgggcaagtcgatttctctgaactgtttttttcacttatgatatggaaataatacttgcctcacaagagtggaattcgatgaggtaatgtgtttagaaagtgcgtggcaaacggtgccttttaaggagcggcagtggggtccggtggaaagggccagggctcgggagtcgaggcgccccagcattgtgctctggccccaccctgggctcactgggtgtctttgaaagagttactcaacctccgatctgctctgctcccactgtgtcaaatgagctgacaccacttgccttgttgcctgttgtgagatgaagatcacacacacgccaccttctatcagatgacaggaggcagcgagggtggttcctgggggtgggtgtggaaggctgcctggccttgaatcccagctcagccactcaggggctttgtgacctggggaaggctcctcaacctctcggggcaggtctcaggtggaatctgaagggcaacgccttcccgcggggctgtgctgagctgagaccctcaaaacagtgccaggtacctgggaggtgcctcctgagtctgggcaggtcctgctcatcttaaccagggcttttggcctttgcaggatgttcactccaccagcttccgtctccactgacgccagttgctggttttgtcccctccatgtgcttgtgacagaccccagggtctggggtccttcagaggccacgggcccctctcctccctcggtctcggcagccttcccaaggcagtccttgggtgggcccctggagaatgcagacagttctaatagaacagggtgagcctctgagaacagagcaataccagccccatggcatccctggggccacggagtagggtgtcaggatccccctgccgccaagcacctgattcacaggaagctggggcctcatccaggcaaccgagccctaatgacagcttggccctaggagcaaggcagacggaaggaaggctttcttgactggcaagcctggctcccttggcacactcctctatggccaaggggagctgggggccaagaggggttgtctggtcccaaggcccagaagttcctgcaggcacccatgggaaggatagcctgatccccacagggccaggcacctgctggggcagccaggagccctgtcagttggggaggcctcagaagggtcaaggggatcagctgtgggagcccaggtttcagaggcaaccacgtctggatagaaaccccagctctgcatcccatgagccacagtgtctacatcggggtaatggggacaacagcctcttgccttaggagggcacgaggactggcacatggcatccttagaatagcagccactgctgacaagcatgttagtgaacaggaagggctggttggagagagtgttgtggagttaggggaggatgtggggacagtggacaagccccctgggaaagggtgacaagtgctctgagcccacacagatgtgacattgcagatggtgcagacccttgctttatttgtctgacttgttcacagttcagccccctgctcagaaaaccaacgggccagctaaggagaggaggaggcaccttgagacttccggagtcgaggctctccagggttccccagcccatcaatcattttctgcaccccctgcctgggaggcagctccctggggggtgggaatgggtgactagaggggatttcagtgtgggacccagggtctgttcttcacagtaggaggtggaagggatgactaagttctttatcacagacctacaaaaaatgagataattagatattactctcactagtttgggcttcttttttctttttctttttacaaaacagcagctggaaagagaaatgtaggtggcagacgagccaggcacgaggtttcagattggaagggaccaagatgaggaccaaggtgtggctgcctgactaggaacgctgtgggctggcccaggctctcgccacacatcctgggagaactgccataggccctagaaggagggatgaaaggcgtatgggagggaagacagcggtccccggatcagcagcagcaccaccatcctctgatggcccctgggcagtccgccagctcggaagcactcagggctggagcctgggctctaagcatgggccccaggagccagacaggagggaggcagcaggaagggctggcatggaagggctgagttctattggggtcccacgcgggcaagggaaccaggactcatccctgcttgtcagccaatcagcttcttcaggaaggcctccaactgatcctcatccttgatgcccacaaacttgtccaccacgtccccattcttcatggccagcacagtgggcaccgctgacacctgggtggagaggacaagggggtccaagtgaattgggagtgaatacttctcaactgccactcctgagcctttgtggggaaggctggtggcttatccagggcactgacttcccaaagccatgggcaggcctagaggaacatggctcttctctcggtgcaggggtactgcagggcccgggggccacccgctgaagaaacgtcttccattgcgggctcccaacagtacccttcctcccttaaccacaagactgactcactggcccagtggttttgctggaatgacaggagagatgaaaataacccttgcagctgcaggccagggctgggggcagggaggagctcaggggaagcctggcccaggaggagacagaagctgggggacagttcgagtcctggctttgcactcactagcaagggggccttggccgggtcacagcacctttctgagcctcagtgtccttttccataaaatgggggtaatgtctacctttagggtttgggatgaacattaaagattcaagtataggctgggcacagtggcttatatctataatcccagccttctgggagactgaggctggaggattgcttgagttcaagagttc

SEQ ID NO: 70086 - DNA, 2156 bp, Homo sapiens
tcacttgtctgtcttccaccagactgcattccccttgagggcagggactgggcctgaccagtctgtatattgagtctacatatgagcagcatagaacatggccgtgggacacagcaggcattcaataaatacttgaacaagtaggaccctagtcttctgtggacccccaatactcactgtgcgtggaaatccacaaccactggtgtctcactgttgaccactcggtcttgaaagtcaggtccatcctggatattaaaggttgtcaaggagatcctcgtggtgtatattgtccgggctgggttgggtgttacagtcaggccaccaggactgcattgtggggtctgcagggctctggaagtgaggggtggccactgaccctgagagggcttcctggagatgacagaggccaggaacctcctcagaagaagtcgctgagccatctgtgagggaaagaggcagaagaactggggcacacaaaaggaagtcgacacactagaaaaagatttggggagtactcagggctcaggaagaggcagagttggaagcaaaatgcaaggaaatcatatgtaagatttgtagcgtggaagtgaggaagcaatgagaatcaaagggaaggaacagctaggcaaaccagaaggacaggaaaactggcttcacaaccaaaaagaaatcgggatttagattataacggaagaatgggaggaagaaaccaacagatttaataatgtatgtaaggaccaagtaccttacacacattattggtcttcctacagcaacttccaggaagttgctattgtactgcccacactgcgagtaagggaaggaatacgaggctcaagtaagttaagtgacatgcccaaagtaaccccgctattaaatgacagccaacactggaacccagggtcgtctgaaaagatgaaacgcaacaattcaaggaggaactaagagtgtgagaggaaccaaaaacgaagagacatgtactggagggaaccaataaagaagggacatgtgtggagggaactgggaaaaatcggacatcaccagggaccctggctctccggcgagctagatccccccgcccgcccggccgccagcctgcgcaggaacgcgctcgcggcatgcctcagccgcgacaccacctcgagccacccccacagggctcctacctccctgcaatgcgagcggagggatgcacagcctagccctccctgcctgtcaagggcacgcctgtcgtcacttcctcggggggggacgtacataacgtcacttccgggtacaggcaggcggaagagcgtccctctccaattttttttttttttttttttttttttgagccagagtctcgctctgttgccaggctggggtgcagtggcgcgatctcggctcactgcaacctccgccttccgggttcaagcgattctcctgcctcagcctcccgactagaggcgcgcgccaccacgcccagctaatttttttatttttagtagagacggggtttcaccacgttggccaggacggtctcgatcttttgacctcgtgatccgcccgcctcggcttctcagagggttgtgattacgggcgtgagccacagcgcccatctgtccctctccaatttgaggggcgtctgggattttccgccaatgggaatggcgggctgaggcacagttgaaggggcggggcctcagctacggaccggaagcaatgggcaggccgtcggggaacggattggaagaggcgggcgggccctggtctgggcgaaggcgggggcggggcggggcggaaacggaaggggtgggcgggccctagaggagggaccggaagaggaggtgatggagcaggggtagcaatggagggtacttaagggagaaaaggcagttgagaagtccccgtggttttggattttgcaaactcttgttgctttattttatttacatatatttatttattaatgacagagtctcgctctgtctcccaggctacagtgcagtggcgtgatctccgctcactgcaacatccaaatcccgggttcaagtgattttcctgcctcagcctcccaggtagctgggattacaggcgcgcgccaccacgccgggctgatttttgtatttttagtagagacggagtttcgccatgttggccaggctggtctggaactc

SEQ ID NO: 70087 - DNA, 2614 bp, Homo sapiens
gctcaagaagggaagaggcccgaggctcgacctgcatcacctccctggaaagccagggatgagataccctggctttaataaatgtttttttttttaagagcagagcggaaccaggaggagaaactgagccgctcagcaaaaacgaagtaacagctgtactagtcacaggggcaggatagggaggttccaagagggcactcagaaggggctctgtggttggcaggccactacagatcataagccgtccatcgctgaacagggggtggggtagatttaagatcagagatcaaatctacttctctatcctagcctccagtttcacaaaaaaggaaagataacctatgcactgtgaattcctaagaacaggggccaaacaccgctcagcctggtacccctaagacctcactcaaaaagtcagggagttttcggccacttcagaaagactttgttgttacccctccgtcttaacccaggtgagttaagtgacaatcaaattcacccagctcatgggcactgagcagggccgagggccaaggacctcacccacaaggtcgtgtcccgcgttcagtagcgtgcgggacgcggggcccccgaaagtggattcctgccccgcccagcggagggacggcaacagcaggaagggactaagagaggtctcttccgggaggccccccgaaggctggacctagtccgaaccggctccggagggccgcaggaacctatgaaacacgccgctcacctgcaatggcctcggccggccgggatggcaacagatggtgcgtgccggggaccgcgttagcagcagcactcttgagaaaccaggaaaagaggaaacatgcgcgcgcagcgggcgccgccgtaaacacgaccggcgctgtcgtaaactgctctcccgcttcctctgggttgggcggaagaactcacgagccgtaaagcgaaggtccacccggaaatccgttactgcgtttcgccaggcgtcctcattagcctccgaggcgccgagacgcgagaggtgtgattggcactacgtcaggcggtatccggggacgcccaaagagggcgttcatcactgaaacttggcggccgcgcaatcgaagctcgaggcggggagcgactggcgcccttctgtgtcccacaatgcttcgcggcgcgcctcagcccccatgtatcccaccgtcacccgcgactccccgcctgttctacctgcctgcttaatgtgaaactcagcgcaggggaggtccgtcggtgtcttaggcggtccttattgttactcctccgcctttatagttgtggaaactgaggctcagaagtgccaagtgacctgcctagatcagactgttagtttagggttctaaccgccagagttcaaaccatacttccgcagttctcaaacttaattgtaggacagggatttctggaacagtgtttttatttatttttatttattttttgagacagggtttcgctctgtcgcccaggctgaaatgtagtggcaggatcacggcttattgcaccctcgacttctcaggtacaagcgatcctcccagttcagcctcccgagtcgttggtgtacacaggcacgcacaaccacgcctgcctaatttttgtatttttggtagagatggggttttgctatgttgctcaggctggtctcaaactcctgagctcaacagtccacccactggggctagggttacaggcatgagtcaccgtacccggccagctaatgatttttaaaaattttgtagagacagcgtctcactatgttgcccgggctggtctttaactcctggtctaaagtggtcctctcgcctcagcgtgcggagcagctgaggctacaggtgcatgccaccatgcctggctaatttttttttttagacggagtcttgctctgtcttccaggctggagtggagtgcagtggcgctatctcagttcactgcaacctccgcatcccaggttcaggtgattctcctgcttcagtctcccgagtagctgggattgcaggcgtgtaccaacatgcccggctaattttccttttagtagagacggggtttcaccttgctgaccaggctggtctcgaactcctgacctcaggtgatctacccacctcggcctcccaaagtgctaggattacaggcgtgagccactgcgtccggctgcctggctaattaaaaaaaaaaaaaaaaacttctgtggagacgaagtctcatcatgttgccaaggctagtctcaaactcctgggctcaagcagtcctcctgtctcggtctcccaaagtgctgggattacgggcgtgagccaccacacctgaccaggatagtatttttaaaaattcagattctgggtctcattttgatagattatacggatatgtttatgctggagcccaagagctccgcattagctgtgattctgaagtgacgactcaggaactgctttactacagtagataacagtgctgtcctctcagcaactcccaggctatggagttcctcctggtgtctttctttcggaattttaaaacaatgaaagataatctgagggcatgactttattcaaacctcagatcctttctacctgacataggtttccttagccgcctagtatgtctcctt

SEQ ID NO: 70088 - DNA, 1836 bp, Homo sapiens
ctctgtcctcttgtgggtgagggcctgggcagcaacttgtcttcccacagcacaagctccgaccctaccaagtcagaaaagaggctgggacagggccacgtggagtcagggagtggggagagggctgtcccccatggcgaccctgatgctacttctcagggacgggaaaggagaggaaggagtgtgttaaccaggtcaaaggctgctccacagtgaacactgtgctgtttcacgttacttatttcatgtgaggaaactgaggctcagagaggcaaattaccttgcccaagttcatgaatccaggaagggtatgccgtggagtcttcctggcttcaaaacccaggttctctcctgtgacccgggctgaggggcagcagattacctggccccaggaaggagtggggccaaagaagcaggacctggggtgattctggggccgggggagggagggaatggcaggggtgggatggtgcggggacacaggcacacaggtgaaatgctgatgtactgagataggctttgcttgggagatcagaaagacctgtgttcaaatgccagcctgtgccaactgctggaatttagcagccagatggaacaccttgaatatctgcgcggcccctcccccagcctgccacccccgagaggaggccctcacagctcctcttgcctctggctgcctgagtaagcagtcccctagaagagcctgactcattcgccttggctccctgccaccagagctgcagggaggacagtagcccagtggctggtggcttccagcttgcactgactgcccagcctcctctggggagcagatggggacaatccccccacgactctgctcctggtacccgcacaagccggggcctcccaggtcagctctcattccctggcacagacctgtcccaccttcttgtatgtggttctgtgtttatgtgtcattgtccctcactaggccgtgagctcttgcagggcagggatgcctgagtcatctcccgtccccagtgctcatgacaggacttggcaccatgtaggggctgctcagcaaatatttgccaaattcccttccaaatcaaacaggaaatccccctacccttgccggggggcagttgctggtggagccgggcccgtgaccatggcttctgcgggctgctcacccggcttcagccctccagtgccaggcgcgcacaggcatatgtcacatttcagcattgttttccttccgatgctgctttcgattgctggttttattccagcccattctcactctctgtcttggaaaatcacaaggcaactccacgctgctcctggaattcttgccaatgtgattcaagaggaattgagcacactgcgctgagctcccctcaacacaaagacgctgctactttcagtgtggtggccttccttccaccagcctggccccccaccttgcccaggtgaggcgggcggggcggggcagcgtgtgcgcttggctgtttcacccagttgtcacccacaaagtgccccagttgaaagcacccagggctgggaggtgtgggttgttagataaacgtggaagcaaggttgccccataacagcccagagccttccctcatcccagtcctcactcacaacctactctgctaaagttttttaaatcatggcttctttactagctatgtgacttgggataaatgacttactctcctctgtgcctcagtttcctcatgtgaaaaatggagacgattgttacaggattaaatgagatacagtggcagtacccagcacagggcttggtgtactgtgggcattcagtgacttctggctgtgatgccaatgacctgtgtcagtgccggcaca

SEQ ID NO: 70089 - DNA, 1453 bp, Homo sapiens
aaatccactggagctgcgaagtgccctggaagatcattcttccacgcctaacgtaatttactgtatcagtaattgcagtaactcgcctttgggagagagaaaggaaaaggtaggcaatttaggtgaacaaaagctctggatgaattatgaaggctctggactccagagaccaccgtattcaagcgcaagttttcagactcacctgccaggatgcatttggctgccagcttcaccatggtaaccaacactcccgcgagccgtacccagaggacaagagcggctgctagagacgcgagtgggtgggcttcgggccctgggctggcctgggacgggaaggtggggaggggagggctgatctcaagggtcagtggccgcgacgggactggggatgaccgagcccggcccttctgggccgggggcggatatcgggcgctgggggcgggtgggcaggggagggctccaggtgggcccggctcgaggcctgacacggcagtctgaaaaggtgcaagcgagcggacacggcctgtgctccccgcccagcccctcagcacagccctacccagagggttcaaggaaggacgatccggctctcctccgatcacaagtaccgggccggatgcactctccaagcaaccatagcccacctgccccgcctcctcctcctcctcgctgaccctcgattggttgccgccaaaagctcccaccctcaaggtctcacaaaaatccaatgggagtagagagctgggataacagccttttcttgagatgcaattcgtagagttatcagttcttcaagttcagtctgcttgacgagtggttgtaattgacgtcaaccagctttatatcccgcccccgctgcgcctgagagtcccgagataaagaagcctccacgtcaagcagtcagaagcggtgacaagagaagctttctgattggtcagagtctggcttgacccatcttcgggaggaatagggattcgccactcccgctgtccttctagaagtgggttcgcctacaatggggcaggttgggctctaggcggtctggagcggcgcctgcgcagtgggccaggccgccgctgtagaggtcgttttgacttgctctgacttcgcgcggttctcgcggcttccccggttcccgggttctgcacagcgcggctattaaagtgcatggagaagtgcagtccttgccccgcatcccgcagggaaatctcattttaaaagctcaaagatgtaatgagcgttaaaatctaaaatatgaaggtgttttattaaagtgatgtttgtgaacaaagggagaacaaatacactttgatggggctaagcggtgagactcggaaacttgaagtcgtactttgctcttagtccatttactctctgcaaaaggagaatgcatcactaacctcgtttgcccgtcacccagggaggctctctgtacgcgtttactgggttgggg

SEQ ID NO: 70090 - DNA, 1019 bp, Homo sapiens
tagacagcatctctgtcctctgcccactagatgccagagcaagctcccttgctgagaccaccaaaaatgtccctggacattgccaaatgtcccctggggggcaaaatcttccacggatgagaagcactgatttagatgtatgaacccactgaataaaggatattgattttgcacttgcaatctacaaggccttgggcctcgggcttcctgggcttgaatctttgtcttgccacctctcctctgtgtctcagtctcctcccacctgctccagtaggcgctttgaggctcagaagagtggccacatgcaaggggtccccagcacgcctgacacgtggtaagactcagtgagcaccagttctgatgaacagccactggggtggccatgagtccctggaggaggatttataatgcggtggtacagttctgttttacaatttcctataacgcactgtcacatctggtgcactgccttctctcggtaatgacctttgctgttcttttttccactgttcacgtgggcccggttgtttatgtctccgctgatgcagtacttggcggtggccatctcaataaagggcagaggaaatggaactgactcaccttctgtgcgcccggaatgcaaagtggaggcctgagctgtggcctcggcggggcacggaggccgcgatgtcctgattctgtcagcagggggcagcagcagccgggaaattgtctgctgcaggagggcagaagggctgccgccttttgacttatttgctgccgcctttatttaaagttgagcaaatcatccctccagagccacccggaggccccctttaacagcccgagatactccatctgcagaagccaagagccgcttttccagaacgttccacattagtgcatctctgtccgtttgctcgccaactgagaatgagaggctgagacatcacctgggcgcctctctttgaggcgcggtgctttgatttacatcccagagccaagggctcctgagtcctgctggagagttcttctcgcac

SEQ ID NO: 70091 - DNA, 882 bp, Homo sapiens
tggtctcagaaggcctcagggaagagatgctatctgaggatagccctggagatccaggcaggttggggagcctgcgggaacaaagcctttggggaggcaggtgttcggtggcagcagaacattcttggagctcatgctttggttctgaccctgaaaaatgggttgcttagggcaagtaagttaacctactgagtttagtttcttggtctgtaatgggtgtctcagcaggggcactattgacattggggccagatggtcccttgtggggttgtcctgagcattgcaggctgttcagcaatatccctggcctctccactagatgccagcagcactgctaaattgcaccaatcacatggctctccagatatttgctcctgaggggtgaaatcgcaaccacttgtgtaatatgggacaacagtacataccttgcccacagcagtaaaagctgctgatgaagagtgtgaactcagagtcagcctgtttgggccatttcctagctctgtttttcactagctttgtggacctttggaaacttgctcaaacttgcggtttccttttctgtaaatgtttcttcatcggcttcctggaaagggtaaaggaggtggtagatggccagggctcgccccagagcctgggtgtgcggcgcctggccaggtactagggtcattaggagacttaaatgaaacttcaaagccagggactttcccagtcactgctttgtccctgtgtggcccacagaagggctgtgttctgactcagtgagtggaggtgggaagtggctgtgttgggccttggcctgggaccagccttttgtattaggtcctgtcttcagacttagtgctcctgtggggagtgttgaaggaggttctgggacaggcccag

SEQ ID NO: 70092 - DNA, 829 bp, Homo sapiens
aagcacacagttgcagaaagagcaagtgacctggtgtcagatgtgaggtcaaatcccactggagcaagttatgtcagctctctgagcctcagtttctccataggaaaaatggaaatgagagtatccactgtgtattggctgctgcacgaagcgggtggcacaaggaaagcgctggctttggaggctggcccacccaccctgccatgctgcgcccccagccacttcaccacccatggagggggtagggggagaatagggacagtgtgggcctttttggtcccctccaagaacttggatggaagcagagtggagggactcggctggctctagagtcctttctggaactgtctcagtacccagtgagggccctcggccaaatctggcttcagaagagccaggaattggggcaaaggggaaagccatggccagagctggtgccacccacagggtgaggccacaggccaatctcacacatgccccaggccactcctgtcttcctcgagcagcccacaccctggcaggggtgggggctctatggttggccccactcccagtgcccaacctgcactttggcctgacacaggcctatctccatctctttgagccctccttgctccccaaatccccacccccattcaacctggattatgggacagggcaggagcagggtggcaggagtgggaggggaaggatctgactagtgtggccaaggcatatactggggctgggtacagccaagcaggccctgaacctccgagcctcagtctccctcctgcagaacggggacaaaaccccacctaggccggatgcagtggctcacgcctgtagt

SEQ ID NO: 70093 - DNA, 575 bp, Homo sapiens
aacttctgagtcgccttcctggggcaactagcagaggggactccctcctggccctgggaagtaggggtagggcagcattgggtgcgtcctggtttatagccctggtttgaaacaaggcagcattggattcgaatcctgccttccaccactttatgtcctggcatctcagtccccccaccccccgctgccaaaacaggggcattgagctttgttcgctgagataatgcggtgccaagtgtctggcatgaaatggcagctgctgttacaactctgccgacgggctgcagctgcctggaaaggttatggaacctttgcaaacagcaggcaggggccccaggagagctagatttggggagagggggatcctgcggggagggacactgttgatgtctataagggtttctgcgggacgagagaggcctggagaagctggatgtgtccgtgggaggtttctgtacagcaatgcaaacgctggctcaggggcatgacacccttaggtatatcctagtacatgtggggcagctggtgcctgggagtggaggtggtggacatgtcaccagtgacttctgctcaca

SEQ ID NO: 70094 - DNA, 2501 bp, Homo sapiens
ctgctcgtaggtcttgagcagggagcggtccagtgtggctttgaagacggccggttctgggcgtgagggctcggatgtcaccgggtggccctccttcagccagttccggaagccaccattgagcactgatacggtgcggtggccaaacacacggaacatccaccagacccggggagcatagaagctgcccaggtgttcaccatcatacaccaccacgtgcgtgtggttgctgatgcccaggcggcccacatactcggcgaagccagcctcgctgggcagcatcatctcgtagggcgacgccgtgtcccggcactcttctatgtcaaagaaagaggcgccgggtacgtggcgctcgaggtactccttgcgggcctctcgggtgcctggtgagtaccaggacgcgtccagcacccgcaggccgggccccagcttgccagtcctgatggactccgccagccacttggtggagaccagcgcccggtagagcacctgatgaaccatggcttcagctctgcgtgtcacctggcacgggtgggaaccaggaaagagagacaggcgtgaggaaggaagtcggtgtgtgcagtagggtgaggcctgggagaagctctttctccctccgcactcccccgggttccttgtttacagcaagccagcgaggctggggcgtgcagcgggataagtttgcagattccctctggaaagccggccccgcccctcccagccggcccgggggcccagcgcagaagcgggtggggcaagagtttccgaggactccaagtaggggcgcttcctggggcggggatctggctcctagaagttacagtactcgatcccgccaggaaagagcaatgaaagcatgcccgggatggggggcgatggcatcttgggcttagaatcccctttccttccaaggcagagggggtgggcgcacggctaggaagctccgcgagccgcgcacacgccatcgcctgcggcctccccaggcagcccgagctcgcccgcctccagagtgcccgagtccggcccgtagctcgctgccctctgccctaggtggatcaggggttcccggggcaccccgtcccactctcgcaacgctatccttccccgggcagcaggtggcccgaccggcggcccaggcgcccggccgctgcccccgccccgcactcactcgccccggacgccgcgctggcgctcgccccggccggctggagaagttggccggttcaaacccccggccgcagctccccaggcggcgcgcaccatcgcgccaccgccagagggggaccctgcgccgcccgccgccatcccgcgcctcccccgcgcggccgcttcgcgcccggcacctgccaacctcgcgcgcggggcctccgggacccgcgggggtctgagggggacgccgggtggcgcgggggccgcgcgggcctgggctgggcggagcgggcgtacccccacggcccggccagtggaaggcgcgggcagcagcggctccgagtggccgcggcggtgggctgtgccggagtctcctccctttggtccgctgcaggttggtggcgggaggaggggacagctgcgggcgcggggagggggcgccgcgccgcgggggccatggcggagccaggaagccgggagtccgagacccgggtaactgccgcggcgtggcggcttgcctttctggagggggagggagtggctctttgggggtgctcggcgcggggctcccgcgcgggacctgggcggaagagggggcttagtctaggagagaaggcgcgccgctacgttggcactaagggtgactgtccgcttggggcggcctgccgggtggggtcgtggcgagtggcgggtggggagccttgggtggaagtgggtgacctggtggcaccagagagggcgggggagagagaggaggacagggagacgagaccccgctgacccagaggccccaggaagagacactagccaataacttgttagtgagtgaaaggaactaacattgtccagccctgcttggtgtggcactttgctgggtactcccgtggtgtgacttaattcccacaataaccctgaggagtaggccagaaacttactaagacaggagagagcggcagagcgagttgctggaggacacacccagagttgaggccgggcctgatccctggtctgaagcccacgtggtaccagctgcctttgtttacctggctcttccctgaaggttcatgctttttaaaaaattgcctgttttgaacttagcccgtttaatcataagttgatgtaattcaatttttaataatagctgtatttaacaaccagttggcaaaattcctgaaaagctcgccatgggctcttgcaaactgggggacaccattgcccctccctagcttttgcagaggccagcctggaagctttccctgtttcccaaccctgaccttttgttttgttttgttttttgagacaggctgtggttctgtggcccagactggagtgcagtggcgccatctcagctc

SEQ ID NO: 70095 - DNA, 2423 bp, Homo sapiens
atgttggccagactggtttcaaacttctgacctcaggtgatccacctgcctgggcctcccaaagtgctgggattacaagcgtgagccaccgcaccaggccaggttagtgcacttctgtgagcctgagtgtcctccttgaaacggtgacaataatataccaggcctcttaagatcactcattcaacacatactggagagtctactgtgtcaggcattgttctaggatattgttaggattcagtggtacccagcaaggactcagtaaattccagctactgttcctattaggtcgccaatataaatgcttgatgagtgaatgaatgacttccgtctgggacttggttgcaaataaagccgagctgcatcttagggaggggtggagactttgcccctgtttgtgccttgaagccagcagggccttgccctaggatacctccacccaccctcctgcccagcaagtggaggtgaggggcgtggcctggggctctccgggaggtcatggtcattgggtcactcggagcttgtgtttatatgaggcctggcagagggaggcccctggctacccacctttgtgcccgggttcaccaccactggtttctgcgttccctggactctgccctgcacgggccgcacctcccccgccggccctcgcccatgctccagccccagccctagccccaacagcggcctctccctgcttcccttctgacatcctccctgtcgcccaggcccgcagcccgagtgtcgccgccatggcttcgccgcagctctgccgcgcgctggtgtcggcgcaatgggtggcggaggcgctgcgggccccgcgcgctgggcagcctctgcagctgctggacgcctcctggtacctgccgaagctggggcgcgacgcgcgacgcgagttcgaggagcgccacatcccgggcgccgctttcttcgacatcgaccagtgcagcgaccgcacctcgccctacgaccacatgctgcccggggccgagcatttcgcggagtacgcaggccgcctgggcgtgggcgcggccacccacgtcgtgatctacgacgccagcgaccagggcctctactccgccccgcgcgtctggtggatgttccgcgccttcggccaccacgccgtgtcactgcttgatggcggcctccgccactggctgcgccagaacctcccgctcagctccggcaagagccaacctgctcccgccgagttccgcgctcagctcgaccccgccttcatcaagacctacgaggacatcaaggagaacctggaatcccggcgcttccaggtggtggactcccgagccactggcaggttccgcggcaccgagcccgagccccgagacggtaacgcgggggaagggggcaggaggtcgtcgggggcgcggcctctacgccctgagcagtgccctggacttgacctttcttttatttttttaatttatcttgctttcatttcctttccttttttctttcctttccttccctttcccttccctcctttcccccttttccctacccttgccttcttttcacagggtctggctctaccgcccaggctggagtgcagtggcacaatcatggctcactgcagcctcaacctcctgggctcaggtgaccctccccgctcagcctgaccttgcctttaaaggccactgcatgaggtggggaaggagatttgacttccacttgcctcggtgactttgtctgttaagcagaaccataatactggcccttcccctcctgtgctttgggcagtgactctccctagctcattgggaaccctggttgcccaaacagctctcaatccaacactagaggtgtggggggtcactgtggaatgttggggggcaggccccagtatgagagaaaaacccagagggatggtcctgatcagggctacccatgcccctgaggatggtggaatgaaggcagagtcgggggctgcataaaggaaagtctcttccagggaccaaagcttggagaactgagggtggaagggggattaaacagaagtgggtagggcagagccttctgcctgtgggctggatttcctcaggcaagaagcctgtgggtaagctctgtataatgcgaggaggagtccccacaaagcaggctggtcagtggtcacgctagtgtgagtctttcaaacatcccgtgtaagtagatactgtcattgcacagaggaggaaatggaacctggcccaaggtctcaagaaacaacccagccgggattcagactcggcagcctgcgcacttaacagccgtgagcaaccaggaactccccagccctttctcttgtgccttcaagagtgcaagaaactgaccactgcccctagagagctctctgaagagcattcccatggctacagattgggtttggagccgcttgggctcaccatgggccagcattgttttggatg

SEQ ID NO: 70096 - DNA, 4628 bp, Homo sapiens
cacactgaatttatgaagagccagggccagatccagattccctgactcagtttattcctcttttcacctgactgtatcccctcaacttccccctgatgctgagtcatttcccaagtccgcagggacgggagaaatcgacacagcctagaatcttggttttccaagtaagagctctaaagtaactcccaacctctcggagcctcagtttcctcccctaaaacatgggaatcgtgtacttccgaagaagaaactcagatgagagcccttccaagagtccactgcagagtccccgttttccacaccgggggttctcagcctcagtgctgctgacatttacactgaatgattccttgtcatgggggccgtcctgtgtgctgggggatgcttggccgcgtttctggcctctgcccactagatgccagtaacactgcccagttatgacaactgaaagtctccagatgtggccggatgtcccctggggggcaaaaatcacccccagtcaagaaccactgccctaggggcaaataacacaattgaccactgcagtcaggaacagtgtagacagggaaccccaacatggaggggctccccgactccccatcataagcaccttctcccagaagtggaagtgaggcagtttagacactcccccctttctggccggtctcagacaagctttagttttccttcctggaatggctctgccactttgaggagacaagtttgtctgcaaacatgtgaggttctgatccagcttccagtcccaaccactccacacaaggcagcctgacctcgaacatgctgcccagcctctgcaggcttccgtttcttttttcccccccaccccgagataagagtcttgctctgttgcgcgggctggagtgcaatggcacgatctcggctccctgaaacctctgcctcgcgggttcaagcgattctcctacctcagcctcctgagtagctgggattacaggcactcaccatcacgcccggctaatttttgtatttttagtagagacagggtttcaccatgttggccaggctggtctcaaactcctgccctcgtgatccaccttcctcggcctcccaaagtgttgggattacaggcgtgagccacagcgcccagacccgtttcttcacctgtaaaacgggcaaaatagtaccttcctggccagcacggtggctcacgcctgtaacctcaacactttgggaggcataggtgggaggatcacttgaactcaggagttcaagaccagcctggacaacatagtgagacctcatctgtaggcaaaaataagaaaaaagatgagccgggcagagtggcatgtgcctgtagtcacagctacttgggaggctgaagtgcaaagatcgcttgagcctgggaggtcaaggctgcagtgagctgtgatgacaccaccgcactccagcctgggaaacagagcaagatcgtatctcaaaaaaagaagtaccttcctgagcagtatgaggattacatgagataatccacagaaactgttttgcttggtgcagagtaaacaccaagggtttcttcccattagttttaaaggagttttacttattcagcatgttaagtgccttctgcacttccggcattggaggagagagagtgacaaatagaattgtgtcccagccctctcaaagcttccaaactagggaggagaaactagtcttttagagtacatttccagagagaagggggtgctgtgaaatgatctatttcacaacagactaattttacaggtgggaaaacaagctcagagaggttcagtgatttgcctcagggcacacagctagtttgctagaggaacctaactggagttagaattctccaggggaggagtttctccagcggatcttgcctgccatggttttccagattccaggatcaaggtgagaacagaaacgcatgagaagctcagggaagatggccacgtgtttctcagctccacagggaaaccttgagcagtggaatttaaccaatgggtttgggttaggcgcccttcccctaccctagtccaacctgcagcaaggaaaccaaggctgattccagcccgggcttttttctcctgggaaggtcctccttgggtctggacaggctcggaggtgacctgcctagaggtgggcgatctagccgcacctttctaggactacagagcttcagtttaactttgcaggagtttgttaggaatgaactagacacgcaccctccgcccagctccgtcccgcctcctgcaagcctgaactcttagaataattaaccactgactgcaggatcctggcctctgccagggcccgccctacccaacctgtgtgttcgaggcaggaacttgcaacactgagcaacaagaatgatgaaatttttatccacttggcaaatatttgctcggcgccccctctgtgtcaggaacagttggaaatgcgtttcccaaccttgcctaaccagctgccctggaatgttttccacttcctgggtcattgcctccagagatcaaagcccccatccacacagtgggctgaatatggatccatgcagcgatctggtcctggtgctgtggaatcagctttgcacaaggccccagaaggtctgcgttccagagccttcctgttggggcctcagtcttctcatctgaaaaatgggagcaaactcagttctgccatgcccagtgtgggtgtgatgtcacatcaggtaaggctcaaaatgaagtcaggtgtcacacctactggaataacctcagctctataagcacaatggagctttattatccttaactcatggaggatgaatcacttgggggaagatgaaatgttgaaatattcaggttaacggaaagtgttattttaagcacctaaattttttgcctattaacctactaggggtggaacttggtaggctgatcttgcctgaacttctgggggctttgtttgatcccttgattgcacagcgatacctgcaggggctccttgcccctcaactgtcaggatgttgaggtcttcaggtcctcgatactgaatcctagctgactgcccttctggtttcccgtctgtgttctctggagtctccctcggcctgcttcgaggcgggcccgctctctagataatgctgccattcggatggtttcaacgactgtgctgagccagtgactctggaatcggggcctcccgcaactcgattcctcctgaactcagatccctgagtcatggcctcccagccccaagcctgctcctccacctgtgtcccctgtctcagtgtgcacggtcaccacttgtgggtcacccaggcccacacctggcagcaagtgatctgagactctgtcccacttacctacagccggtcagacctccacctctactcccattgcctttgtccaagtcccccactcagcccgcacccagcactcagcctgtctcctccattcattccagggtacttcctagggacaggccctgtggcaggatctgggggcatggaggataaagaccagccctgagagggggcattcgccccatggggagggacagacatggatcctggcaacagcgtggcgaggagtatctgagaagtggaaacacagagaaccgccatgggttggggggctggttctgggtctgagaggcacctccacacccacgcatagtcccttttatgaattccctggactgtgccctcttgctccagggagagctgcagcaggggacggttcaaagggcagctccggagcaccctgacctccaactccctggccgtgagtgtgggcagaggggcctggatttcctcatctgagacgtggcaataatccactttataggattgctgtgaggatgaagtgatttggttcatacatagcactgagagcagaagctgacctcataagcaccaaatccacgggcttgtttgtttgtttgttgtttgttttaagatggagtctcgctctgtcacccaggctgaagtgcaatggcaagatctcagctcactgcaacctccacctcccagtttcaagcgattcttgtgcctcagcctctggagtagctgggattacaggtgcccaccaccacacctggctgatttttgtatttttagtagagacggggtttcaccatgttggtcaggctggtctcaaactcctgacctcaagtgttctgcctgccttggcctctcaaagtgctgggattacaggcctgagccactgtgcccgaccaccatgttgtattgttactgttactgctctcctgtcctgcacctgccctgcctgcctcccttggctgggctgtaaaaccttgaggggtaacgtatcttattcatgtttcttgtcctggtaccagcacagcaactgacatggatggggggttaggggctcagaaagcattgccctaaaatatggcgctctgacatgaagcagcctcaaggtctatctgacctccctgcctccttctctgaatcctctgtctctctcaaagtgcaggatgacgctgttctctgaagtttctttatctgcctagaaacgggacctgccaaaggggaacacaattaccttccctggaatatcattagctagaggttaaaactcatatcctagaggatatgagactgaacattaaacaccacacct

SEQ ID NO: 70097 - DNA, 794 bp, Homo sapiens
acagcaaagccacaccagagaacaaaggacgccaggcaaggaaaacctttcctgcccttccttctacctgcatccccactccctcgagggaggaaacagaggggggatcaaagggtagaaggagctggaggacaggctggggccagagcagcacagagcactccttgggctcctcctctgtaaagtgagatcacggccacatctccctgttgggttacgattaaaagagatcatccacaaaagtgcttggtgcagtccctggcacacggaagtactcataaacgtccctctggcagcaggggcagagtccacggggcccagggggacagacggtaggtccctggttctgtgccatcaagctgtggaattacatgcattggagccaagcagacgttgaggcaggagaggggagtcctggggaggggaggctggtgagaggccggctgccatggcctcagtcccaagagctgagcttctgcaaaaggaatcagcagtagcagacacataggcaggcaggtgctctggggctgctgtccaagacactccccaaggacctcagcaggcaggcgcaccccctgctggtgaagaggagtctccagccactctcccgcccagtcaggtcaggctgggagcgcgctgagccccaccctgctggctgaagggagccgagcccggggcccaggtggtccagcagggacccaaggggccagcatcactgccgcccccactgcatctttgtgcaaattagagaaggcaccctttcctccagacattcctgcccttccttctacccg

SEQ ID NO: 70098 - DNA, 1377 bp, Homo sapiens
ccctcagccagggcagagcagagcagagcagggactctgggctagggccataggggcatctttcagtgaaaccattaggccctagagtcctgagagtgtgggggactgggtgggggtcccttccacacatataaacacactcacagacccacagatgtacacagatggagacacgcggagggatatacgcacatctattcatgacacaaaaattcatagatgcacgcccttcctacacagacacacacacgaacacacatacacatacatgccaactctgagcctgtgagcccagggtcctgggcttaagtcagtacataggtgcaatgtggggctccgggcctgtctcctacaccagaaggcccaggtggggtaccgggtgtggagggggcagcatgtccagtcctgcgaggcaggggtagggtggcctctcccttcctcctgtccctgccacctgaatcccaggccaccaaccacccagcactgatgctgtgcctgtccacacacctggtgtcaccctgcgtggtccctcccctccccagctctgtgggcccctcaccttctgctcactgatcaccctctggccgatgaggccctgcaggcctggcctcggagcagggtaggtggctcaggctgcagggagccaggcccagctcttagggtggacactgtcactaggtcatttatagatcccggtcccctgtcctggaggcccccgcttacctttgggagcggcagataggtgccgggcctgcacacaggcctcaggagcctctgtttgtccaggccaaggcctccccacccccacccagccagcccaggctggatcaatggcctagagccatgaccagggtgtctggcccttgtcccctgtggcctgtggcctcaggctccatggaactcctcctgctgggtcctggacagcactgtgactaagtacaggtaaacaggcaggaggtaggagaaggcagtgcctgccccgccccatcttcccccacccccgcatgggcaccccagaggctggcaggcaggtgcgggagatctgagctctcccccgaggcccgttgcctggtgacatgcctgcctggttacagcccctggtccccgagagcatgaggtagggacagccaaggactggggactgtgcagaggccggtgcaggtgagtgcaggggctcacaagggtgagtccaggtgcttacctggacaggcgagactaaaggagctgctggcctgagagagagaaaaggaggctgggcccatatactctggggactggagaggagaaaggggaggcaggggtggggtttgatgctattttctgtttagctgggaattatttgaattcctacctcgttcttttttttttttttttttt

SEQ ID NO: 70099 - DNA, 704 bp, Homo sapiens
ctgtcaggctggttaggattctgggttagggggtaccttccctcaccttctcctgtggccctccccagagtcctggcccctgcccatgggcctgaccctgaccctgagaccgaacaccatagccctgcccactgtccctcgtcccagccccaacaactctgcctcctccccataaactcccctcttcccaggccctgggccccaccttgcaaacttcctgagggacagatgcttgagacagagcagggatagtgtgtttgtgtagggggtgaagacaccccgatcctagcctctgtaccccatcctgtcctttggaaggtcaaaaggcccaggcccccagcccaggctgctagcccgacagtctgaaaagccgatcttgcacaatcgacgtcctctagacctggcggccacctggccatcgatccgacatggcctggggggaggggctggcaataagcaagcagcagcaaaatgctgagagaggtgtttgaaagcacagacgtggctgggtgcagtggcttacccccacacctgtaatcccagcactttgggacgccaaggagggaggatcccttcagcccaggagtttgagaccagcctagtcaacatagtgagaccctgtttgtacaaaaaaaaattttttttaattagctgggcatagtggtgcacacctgcagatcccactactagggaggctgaggtgg

SEQ ID NO: 70100 - DNA, 1299 bp, Homo sapiens
cacaagcacctgctcccaagggcctccctccctgagttcaaacgcccaagacagagttgatctgattggctagttcaggcccagcctacctgattggacagagcttggtgccaaaccccctcataggctgctggtcagagcctgtgggggcgtgtggtcaggtgcccaatcagctgtgagcaaggcctgtaagtgcaggtgcctgagggctcccaggtcagagttagctgggactggggtcactgtcctgctggggtggaatgttgtttgagccattgcaacgtgatctgcctaggaaagatacgtggaggggtcggggtagggggttgagccccttgcaggagggggcatgccagacctaatgggcacgggactctgcctctctgtgtgaatgtcaggcgcagggagcccagacgaggtggtgccaggtaattaattcgttcatccagggtatacgacggggtgttgggcactgtgtctggggcagtgaaaaataatgaggccctgccctgtggagctgcccttctggaggccagtgtgccagtccctgagctgcagaggagacccctccagtggagggggcagtgggaggtcccaggcctggcagcatcagggcccaccactaggcggggctgctgcctgggcctcggactccagggtttactccccatcagcttctcttgtgggtctgtgaagccactgtgggaagatgcagcaggcatccactttgtggggggatctgtgcccttacttgggccccagcattaaagatacagcagccaagcactctgaggcctcagagatcccaaaggaatagtaacagggcctctttctccaggcgccctgggtccctgacagcttctccctccagcactgacgctagaagtttctggcagattaagggaggcagtgcttccctccaggagaagcaaaaccggcacttgaagagtcagggaagtttgtcacctagatgagggggagcgcacagcagccccagggaatagcatgtgcaacagagggggtgtgagggagctctgagtggctcaggaggacggtagggaggattgcagaaggggatgtccccacacgacaccggaggtacaagtaccaggctgagaagtggggctgagggcagtgggacctgtgcaaggttttgaaccgagggggagcgtggccatatttgggttttggaaagcacgctcaggctgccctgtggacggggaggggagggaaggaggaggctggggcagaaaacccagggaagaggtcagggcagggagccctggagagccgcgagga

SEQ ID NO: 70101 - DNA, 422 bp, Homo sapiens
aaggggtgcgggagggagggaggacaatcttggtgttgggctgaggtggcgtctgtcccctttgcatgagttcagtaaggatttactgagcacctgctggcagcagcatgctgggcactgtgggaatgacaaggatgtgtgggatttgaactctaactcagagtaccttctcttggtatggaggtaggacaagtatgcaaatgattataactaaggaaatcgtgtcaatgtggtgacccttggcctgaactttcagaacagtcctggtatcatgtgagaagagtaaatacatgtgatttgattctaaactggctaagacgttattaaagaaagtaacaagacagaaaaaatactttttcaggctgtctgtgcagttttgtctttagaaaatgtggtcataatgagtatgagaggcatagagc

SEQ ID NO: 70102 - DNA, 1757 bp, Homo sapiens
cttccccacactcccatgtggcagaggagctcctgcgctcatctccccaggaaggctgaacacttccagacacaacctaacctagcccatgaaatggatccagcccatctatccagacagcaggtcaccagggacaccatcaagctaaaatccctgcaccagctctgcccctgattttaactcaggctcccatctaatcaccctttcccccttaatcttccctgcacttgccccgggccactcaacaaaacgatggcaaggtgggggtgaggtcgccctgtctggggtacactccttgtcaggggtatttttcatttcccacggctgcttcccctcttgaccaccctttccttccccttcctcattgcctaacgtttcaggcggaaaacgttttcaaaatatgtaacttaaagggattgccccagaggtgattacatgggcattcagccagcttgctgaggtcatcagtactaagcatggcagatctcctgggggacgctgtgccccacagacctggcagcaggattgggggcctccagtttcccaggacctttgaccaacccccgccaagaacgtgcccattgggagaagcttgtcacaaagatctagtggctcttagcacccatccgggtgccattgagtcagaaacccagacctagcgcaaaaaaacctggcctagacagtccagaggccacatctgagccctgggtggaggaatgtgtgcagtgggtcagatgggatgacacaaagacagccggcctctgttccctgaactaatgtggcctggaactgtctgggggacttggcttcagtttacaaaggataagcttcaatcctcctgcaggcacttggcaagaagtttcaaagctttgctgcctcagcgatcagcaaatggctcatccttgtgctgtacacgacaaaaggctcctggctggcactcaggacagcctttgtcccaaggctggtgaggccgattgtgtacaaatagagcctggcccagaaacacgctggagatcgctccccggggtagcctctgacatgggaggagcctctttggcaagagctgtatgaccctgaggtgcagtgggaagcctcccttcagtgtcaggggacctccgaggaaacggagacctgtctgcccctgcaaggtgggctgctgggctgggctgaatcctggcacaggtgtatggtcagttctcgatagcatgcttcttccacctggtgcccaaaagccatgcaacacaccagggacaacacagatagagcaggatgcccggtcaagtctgttgggaaatcagcgtcggtcactttaaatatacttatgtgagtagccaccaggctagcctagagagtccaaacttgacgacatattagaaagccaggccgggcacggtggctcacgcctgtaatcccggcactttgtgaggccgaggtgggcagatcacaaggtcaggagttcaagaccagcctggccaacatggtgaaacccccatctctactaaaaatacaaaaattagctgggcgtggtggtgggcgcctgtaatcccagctactcgggaggctgaggcaagagaatcacttgaacctgggaggtagcggttgcagagagccaagattgcgccactgtactccaacctgggtgacagagagactccatctcaaaaaaaaaagaaagccagatccatcaagatgctccactgtacaatgtagtagtgtgtgttttcccacagagaagatccaacagttctctcatcata

SEQ ID NO: 70103 - DNA, 4551 bp, Homo sapiens
agcgcatcctgtttatcagcagggtatttatgacctgtatcttatgataccagtcctgccgactcccatctcatcctgtgactaaaaatgcctaacctcctgggaatgcagcccagcaggtctcagccctattttacccagctcctactcaagatggagtggctctggttctaacacctctgacacagggccagggcggcagccaagtcgctcctctatgctccagccccagctacaccaaagtcttcttcctctgactggaattctgccattgttactgactcaccctggtcttctagaactattcccttgtggaaatgacccccaacaagttcacaggagggcagcctgtttgcctctgggtctggcagggtcctgcctcagtttccttcttgttaggcagggggaagtttggcaaagactctctgccctggcttcctggggcccgagactcctgtataaagactgtctcaaatgtcccttatcctccaccaagggatttggtgggttttggctggcttgtttacagcatcctcctattctacatttgttgaagacttactgcctgggccaggtctcatctctctaggggcttttggtccccaaagggtgtttatatccattacttcaactagtcctagggagctggggtcaggcagctgaagtgacttgcccaaggtcacataactggtagagaggagcaaagccccctacagaagggaagactctccaacccgatggaattccctcggggcttgggcatgggcggggaacaatgcctgcaggtcagggccgtcctgggaggagggaggtgcaggagtgcggggaccccggcggggagtggggatatatttaaatctggggcttcaggtgctaaatcccattcccccactcacagctgggccaagtgtggaggatgggacggcccctgggctctgcgtcctcaaccagggctcatccttgggcctccaatttccaatttatttggggggataatcaaacagaagaatatgaagcctggaaagatcctcagaaatgatctcatctgattctttcatctgaccagcagggacactgtggcccagggaggatttatctttggcccaaaggtcacatggcagactacaatccaagctgggatgacagccagactctcccaacctccagccttgtgctgtcacccctcccaaaccgacttggaatcccccaggtcatccattcaggggtgcaagggggcccaaaggaaagcagactaaaggactttggccactgggaacacccaaaggcctgcactggccctgctctctacgtggccctgccccaggcagcattcccagggcgcagagccagggctgcagagggagggagccaaggggagcctccctccctgcttctaagggaaaagggttgagtcggcagcactggagagggagacagctcctgcctggctccaagccttcgggcttagaaaacctgaccttctgaggaaacagggatagagagaaccatcaatgggacttggggagaaacaggctggggacacagcaatggttttgtcaagggccaactgtgtgcctggcagtgttccataccgccctcaacagctcctctgcagagaagagctgttcaacccacttcacaggtgaggaggctgaggtctgaaaagccaggcaactcaccaggttctggtgccagctcatttggctcccggccatgcaatgccccggagaagagcctcctgtccctctaggtgcagggcagctggcaggagtcagagcagacaagagagaactctggaatattacacttcagtattttccctcccattagctttgaccgtgcctgaaaattcctccatttgtgcgtcatccgttggtgtcccagcctttctgacgatctcctcagctggtcaggtggcctgaaaacagagctccagccctggggcagacaaacctgggtgatgactcagctccccctcctagctgtgtgacctcgggcaagtttacctctctgagccttggtgtccctgggccagataaacatgaggaggccaggaccatcggggccgactggtggaatgcccgatgggggcactccccactggccacccatcagtaaagctgtgtgccctttcccaggcaccctgggacccaggacaacagcatgaccaggaggagcgcaggcccagggtggctctcatcaccctgctatcactcccagcagcaaaggagtaaccccaatgcagaaacccagggtacaggccctgcttccccagccactccccaccctttcccctgcctccagaagctggcttttctccccaaccattctgtgggccttccatatcttgactcctctaatccttccaacaatgctctgacgtaggcacacgtgttacctcgtctgtccattttacagacgagatagatgaggcacatactgaccaagagccaagcccctggccaccatcctgcactcgcccacgttccagcccagggtcaggagagggtgtgaaaataggcacattcagtcagcgcttacaaagcacggcgcgcttcatgtatttaaaaaataaaatgtgtgcctgtcaaaaagggagacaggacagtaaacatgattcctggcgtccgctatgtaggctctgagtggcaagtcacagatctaactgttcaagcgcagagatcaatttcaacaaaggaagacgcgagcgcctcctgctgggcagagcccccgcgcccgggaacccgggacgctccccgctccccggtccccggcccccgcccgtcccaccagcccgtcccctcagggaactttggggcaggccagggcgcccatgcactcgcttcttcctccaaacccccgcagtccccgcagcaacccccaccccccacacacaaaccggcttcctcccacgaggagagccccgggcctggttctaccgactcccccacgttgaaccgcccaggggccggggaaagtttcgctctccggaaccaggttccccgtcctgggctttcaggacgtcggatcccaaaggtgttcagcggagttgggcgggctgtcatgttttacaaaaggggaaactgagtctggagagcgccagctccgcgccaggccctctgccccggcgggaaacctgctgattgttggaggggaaaccgagactcagggacactgaggggcagcaacttcctcccccgacacgacagaacagtggcagagcctgcctgctggggcgtgcggctggcgccaacctctccctttctccctgcaaaacgaaggcgaaagacgcccccacgccaggctcggggagcccctccctctccacccgcttccccctcaaaccctggttcgtgtctccctctgcatagcccagggcccaggcaagcggaacccctacatccacgacagcgccacgggcccgagggacgaggacctgcctctctggcccacccgggcctcgcgcccggagggcggagccacagccgcgccgggaaactgcctttgcacttccggcgtagggcgaagccgagcagatcggaacaaggccgagtctggccgagtgctgccgaatacagccgagtagagccgagcctggccgagtggagccaagggtcgccgaatagagacgagtccagccgagcggagctgcgggtcggataccacgcggctactgggcgaggcctgaggacccgcggcgccccctgccgggcctggggagcacagagccacgctccagccgtccccgcagccctgcgacaggcttttgagatgggcgtgggagcccattttttcggatgaggaaactgagtctacgagaggttctgaggctggctcaaaggcactcagcgctaagaggcagtggcgctggggttcaaacccgattgcgtggccaggagctcacctttcactgccgaccacgtaatgggcatcgtgcgtttgttccgttctccctctggcagctgccgtttgataaggcccaacagggagagcccctcccttctgaagagcaggcgcagggtcctggctggagctcagaggcaacccctgatcttacagagggagacaccaggcaggctctggggcctgttgagccagcagttcccctgagcaaatattgacacatttgctggcctttaaagcggacaggagggtggagaggccacatcccagctcttcccctgctaggatccgatacaccccaccccaccgtaggcctcagtttctccacctgtaagatggtgacagaggatgtgggttccaggagagtgtgagccagaacctgaggtgtctgggaccccaggggaccctgagtgtggcccaggcacctttttttttttttttttttaagatggagtctcgctctgtcacccagactagagtgcagtggtatgttctccgatgactgcaacctccgcctcctgggttcaagcgattctcctgcctcagcctcccgagtagctgggactacaggcacgtgccaccatcaagcccagctaatttttttgtatttttagtagagacgaggtttcaccatgttagccaggatgg

SEQ ID NO: 70104 - DNA, 1544 bp, Homo sapiens
catgagaggtagctggccagaggtctcatagtttatgaggagtcctgattcaaacccatgactgacttcagcgcctatccctctgcagaggccagaagccaagatttggggatggaggacttggctgtgctttccagctaccagttacttcctagctaggggaatctcaattcatgtcactgaaaagatcagagatcgatctgccttcagaaatgctggcttcaggttcagctagatccaggtgcccagtgacatcacggcctgatccagttgccccatctctcagcaaccgcctcctctgtgttaatttatctcttaaaccagctctgcccaggtgtggcagagatggcccggccttcccgtgccctcacagtcctcctcctcagctgtttcagctaaagtcccaggattaatgcttattggctggcttgggcctgaactgaactccctgaactgaggctagcaggatgaaatgctctaatcagccagatgtgagtcattcaccccctcctggagcctggggctggggacctgtgggtgtcaaccctgccaagtgacctggacagaacacagaggagcagaaactccccagagggaaactgaggaggtgggggtggagggacacagagccagcagggccaccggaaggaggcccttgcatttctgcacatccacccagccaggaggagacagctaggcccaggggttgcggcagtgcgtgcaaggcgttttcttgcaggagaggctggtgtttacaggggacaggaaatgtgggtgaactcagccgttttctttgcgggggcagaatgtacaggctgatacagtgaccgcagaagctgctgggtccccctgtgggttttgtggcagtgaagacccccgtctgcccccctgcacagctccttgggcttccaaatatttgtctgtgctgacagctttgttgatggggccttcctgttccaggcgcttgttcaaccagccagtgccacctgggaattcccggggatgcacgtaggggcttcccagagagaaactggtgcctgctcttccccacccccatagccccacagccagattgagcccagggaagccactcccagcccacccctgactctggacccctgagctctgaggtcagaaaggaccttaaagaaccagcaagctccatttctaaaactttgagagagtcaaatgatacttgtgagaattttcacttaaaatctcgaagaaagcatctgaacagaaacatctgagcaacagcacacacaaacacagcgaaaggaaatgatttcatcctctgagataacactgcgcttgctttgaataagcagaaatggacagtttagaatagttctccaaacacttggcaatctaggcaggttgctcatagaacgcaatatctcatggcaggagattcaaagcacacaggggtgatctggcaccagcagccacaccttgcccacagggaactcgcagacctggcttacttacctccagtgacaaagagctcattatcctacagggctgctctcccacgtcaccagctc

SEQ ID NO: 70105 - DNA, 776 bp, Homo sapiens
gaggctccatgaagaagaccgaggcagaaggcgccggcatttgtagaacatacttcatctcatctgatcctcccaggagcccacaaggtaaacaggattattcccatttaacagatgaggacgtggaggctcagagagcttgtgacttgcccagagtcacacgaccaggaacaggcatctgatccaattgctaaggccaggaggagccaccagctagaaggctccagcagaagggcaggattaattctgtgacctttccagtccctgtgatcctttgaggctaaagcttaactcttctctttctccctcccccaagggattttcagttcataaataagagcccagaggggaccaacctttgatccaaagaaatgattttttcagaaaatgtcccccatttaaaaattaataaaacatgctcattgcagaaaattggaaagcgcaatgaagaggaagaaaaacttagaccaaaaaacaaatgagatcatgtcctctgttgcaacacggctagagctggaggccattatcctaagcaaacgaacatagacaggagcagaaaaccaaataccgcatgttctcacgtataagtggaagctaaataatgaggacacatgaatactaggagagggacaacagacactggggccttctggagggtggacagtgggaggacggagaggattagaaaaaaatacctggtgggtattatgcttattacctgggtgacaaaattatccgtataccaaactcacatggcagtttatctatataacaaa

SEQ ID NO: 70106 - DNA, 1702 bp, Homo sapiens
ctgcctcagcctcctgaatagctgggattacaggcgtgtgccaccacacctggctaagtttgtatttttagtagagaccgggtttctccatataggtcaggctggtcttgaactcccgacctcaggtcatccacctgcctcagcctcccaaagtgctgggattacaggcatgagccaccgcgcccggccagatgccaccactttgccaccgaacaggtgaccctgctcagctactcaccagaggtctaacctggagcaaattatgcaattagcctctcttagcctaggttcctatctgtgaattggagcagttgggaggatggactaccagggtaaccatgagttcagttaaaaatagttacagttattcagcggtaaattaaataactttatgttttaaaatatttgtgagtttgaatggaactgcattgattaacatttgtattcctttcatatctgagtgggaatggactttctccctgtgagggttaagcatttgtgtttcctttctagtgtgaatcatcgctcctgccctttgcccattcacctgcaggtttctctgcctttcctctccgtctgcctgggatcattacagagcaaagataaacccccatggccgttcttgattgctagagatttttccaaagctgttgctcacctgtctgctggggccatttttctggcttacaaagtggccgaatccatctgactttcccatttttattttctctatcacttttaagcttagattggagcccttctccagaatgtgacaatataaaggaaatggattttgaatgatgagatttcctgcaccttgaggggtggtgggggtgggggatcctggctcaactcaaaccctgtggtggtgatagaaggcatagtcagaaaccaagagcccctcagcaccaggacaacccaccaccctcagctctcctcgacattagccacgctgtctctctccccatttgcagagtccccccgcagagaggcacagggcaggccagagctggatgcgcggctggaaggtcaaaggcatcatcctcaggttggagacaggatgaccgaaggtgtaagaactggccagaggagttggacaactcccagctcaggtctctcctcgactgctttggccgtgtgagctttgcctctctgggtctctgttgtctcatccataaaatgggcctgaccatgcccaagtcaacggaaggatttaaatagatcagcgccctgaggtcggtgctggacgccgagtacacgcgcccagtacacagggcttgagctcattacacgccccagttctgttcctggggtggtggcgtgaaccccactgcctttgcctttaattgcactgaaaatatccagcaccgctgatatcaagggcccaggtcccggcggaaatgaactcccagacttgggcgcccaggtttccgtgcgcgaccccagcccctccggctgcagctcagcccatcggccctgcgcgggaacagtgtcacccgggcacccgggccagaacaggccacgcgtgtcccaggagcgcgggaagctcccacgccccctcccccgcaccgctcctttggctggcagagcgggtcctcagcgcgtctcagccgcaccaagcgcctcccgctcccgcgccacccgggcgcgctgctggggcctgatttccataataatcagccagagatctcccgaaaaggct

SEQ ID NO: 70107 - DNA, 521 bp, Homo sapiens
ggcaggagaatcgctttaacccaggaggcagaagttgcagtgagctgagattgtgtcactgcactccagcctgggtaacagagtgagactccgtctaaaaaaaaaaaaaaaagaaagaaagaaagaaaaagaaatgcctttgacttttgccaagcccctgctgcttgctgcctccccatcccgaatcacggctacctgggtggatgcactttgaactcaagatattcatcccctgcccccattcatcctgcttgtcctcactccaagcttatcaacctggcctccagccaccctctcccgtcagtgacccagcctgaccggttccacctccagcacccagcacaatccctgccccacactggttcttagcaaacattttctttctctttttttgagacggagtttcactcttgttgcccaggctggggtgcaatggcgcaatctcagcttactgcaacctctgcctcctggattcaagcaattctcctacctcagcctcccaagtagctgggattacaggc

SEQ ID NO: 70108 - DNA, 1654 bp, Homo sapiens
ctgaaacagtcacagcacttggaaaaatagacaggttgtaccttgcggtgcacaggagtctactgcgtgctgtggcagagactgtggggggcccctaccatatcctgtctcccacctgccttagcaacaaacacttggatggcaatgtgcctggccaaaaggttccgtttctcagcctcccttgcagctaggagtggccactgagggccaagtgtaagctgtcaggtgggacagaagggaacattggggccagtgtgtgcccagtccctgctgaaagttagacgtgatgatggaggcccagcagccatcttggatcatgaggtgaccttgaggatggaagctggctgctaaggcgggtgggactgaaagagaggagcctgggtccctgaagacaccattggggcccccaccaacccaggacgcctacccccgacgtgttaggtgagagagtgagaagtctggatatggtttaaaccactattatcaatatttccagcctctgttctcagcaaagggaaataagccctgactgatacccaaaccccgtgaggtagataccactgtacaacccctgccccttgcacccccgttttacagatgcacccccagcctcccttcctccctctgtgatgtccgtgatgcccaaaagaccagcattccattcccagccccctgacgctgtgagtcagcctctgccagacctggagtgggccccacggctgcaatgtcaacagtgctccatgcagatggctgcggctcgagctggtgacacgagcgctgttgagaaagcaaagtgctgtcatggacagcgtgccctgctgtagagatcaaggggaagccggagaatatttacaaaccacagagaacagacacacgaagtgaataccagttgggtatagtaaaagcctcttttaaacctgtcctactctttctttgccatgtgaaatcaagtcgctggcaagaagctctccggtaagactaaggtttgcggctctgctgcaggaaacaccatgaattccacactgtgaccacgtgcggggctgccctgcaatgcagggcacagtggctgggtacttggcaaggaccctagactgcctgggctcacatccctgctccgtgaactggttaatctcagggcaaattacttcacttctttgtgccttagtttcttcatctgtgaaatgggcaacagagggcggctgatctgggaagagcttacagcggtgcctgctacacaggaggggctattaaggatcagcaccattctcaggttcacggtgagaacctaatttccttattgtctgtttgttataggaaactgaatttactcaccagcattggaacattccatctgctgagtcacactcacttctcttatcatcattaaccctgcgtaggggctcctggcgccagaaggagcaacccaaagctcttcgtcttggtgaggttgatgcaagtaaaaataagtggtgattataagtgattcacttgtcaaacgcaaggtcaagggtcccaatttgtacatgtctctaaggcagcatcaagaagctccccacatcccaaactgtctcccctctgacactagtggaaatttcactatcagagccagagaactccgaggaggagaagcaatttcagagcacagcgtcttaga

SEQ ID NO: 70109 - DNA, 3838 bp, Homo sapiens
atgggaaagaggagagaaaatgcccaacatggtgcccagtacaaagtgggcacacaatacggatgtgagatctccaacagctgagacagtggggaggcacatcggaatctccaaccagctccgaggggcctgtgacttgggaccaatttctaactgtctctgtacttcagtgtcctggtctgtgtaacgaggttaaaattccagccttgcagagctgctctgaggattaaacaacaatggcgacaataatcataactaaccgcgagcatatgctgacatccaccgtgagtgtgctaagcattctagaagggatactcaaacccccatagtgaccctaagggacaggcactatgtgagcccattttacagagcaggaaactgaggcactgggaaattcagagacatgcccaaggtcccacagtagcaagtgctgacaccaaagccagctcttcccacctcgccataacacaatcccaggagacacacaagttgccccgacctgggacctgtccgggccctcatctccctctccctctcctctccgcctgtctgcctctctctctctctttctctctctctctctgtccaccacctctgcaccttccccagcctgtgttcttccccaggaacctctctcctccccaggaacagcatgggcagcagaagtggccccatgtgatcgtggggcctgggcggggctgggacggaggctcctgctccctggctgcatcctggcgccccctggacaacagccaggacccctgctgcagcccaaactggaggaagggaggaagggccgaggcgagcaggaagggaggcgcctccaccccttccccgagaagcacgtcctgcacaggcaaaaacaatgtctcgctgagcccactgccgggggccaggtgggggcagggcctggacactggctgaccaagccgctccggaggccagaggccctggtcctatgctgtacccatctgctgcgtgacccatccctctgcacccaacacctccacattccagcgctgacagtccatgtttcctatgccctttccaaaacccaaatctgatcaggtcactatgaacccagacctggtacttcccaactgtgggaccctgggcaagttgcttaacctctctgagccccagttacctcctctatggagcagagataatcgtcattatgcctactccctggacaaagagcatgttgtaaaacagccagcagctggccttgcagttaataactaaaccctcccacatttcccagagtgtacaagccaaagtccacactttcccagcctgactcaggaagccttgactttcgcccttccccctcgctcctcctccacagtcaccggatgctctccctacctgccctctcctcacagctgagttccaagaccacaatggccgtgcagcccccgctctgccccacccctcccttagatacactggcaggtgtgaacagcggccacgcaccggccacactaacagcacgtcgcctacagtgcactctgcactaatgggctttgtgactcctgttatggacctgtggctggcccggtcacaggggctcctgaggtgacccaagcccacccacagcatgaaactttgctgggtggctcagtcccagggactcagagccaagggactgacaggcaggacattgggacgaggacagcttgtaagtgacaactattactaagcacctgctacatgcctggcagagctgggtgctttgcttctgcgagcagagccctcaaaagacctccatgcaaaaagggtcatcatctccctttagctactgaggaaatggaggcccagagaagtgaagggaccagcccaagtcacagggacgatcaagagcggcagcaggattggaatccaagggctgccagtgtctacagatcttaatcttccaatagttgcataaaacaggggcgaggcaattgctcctcccacctcactcctgttcccctctcaagcaatcaccccagctccacccactgcaggcagctacagtacctgttgaggaagtccaggccacagccccgagccaggaggccttccggctttcccaaaggccacacgctgtcagaggatgaggacgaagagaggccaggggaccagggcttaagtgtcacactccctggggaaaaagaatgaggttcagggatctggcactgggaaacagggatggccagggtccatgacagggactgacccccctccagcccagagaggccttggcaggtttgaggccccaggagcacatcagacccactgggctcagagataggtcagggcccaccaggctgaccccgcagtttcccagaagagggtgaaaggtggcccagaactgaagagcctcgtacatcacagccgggaacaggagtgaggcccaggactgggctcggggtgagaggctggaaccaaagtccccagggtcctcccaagcacaaccttcctgcctggcaggggccacggcggggcttcagggaaggggatgcaggccaaaggtagcgcaggtggtgcaggcttcaggtgggctgcaaagccacctcccccgaccagaggagccctccccacggaactcaagggctgttacctgtgatgtctgacatgctgctgaaggatctgggcagagagagggcagggagggggcaggaggtgaggcacagtgggcactctgccccgctccctcctcctgcccccacaccagataaatgtctcacagcccccaagcaaatgcaggctagactcaaggcagggtcccaggtacagggcacccatgccacctggctcccctaaactcccagggtaagaagttaatgtcctggcctctgtccaatgttgttccacctacaatgccctggcatgcccttcaaagccagctctttcaatgccacctcctcctggaagccacccctgatctctcacccctcacctcaccctcacttgccacctttgtggtttgtgactcccaggtacgcctcctaaattaaaccatgacctcctcatcagacacctccttgggacagatttacgcagatcaaggccatactgaccacagcctcccagggcccagcctctcaccagtaaaggaataaatcaagggctgcttacaggggaaaagcagtgacaaggatcgcgccccaggaggcaggctatctcccgcccttggtcttgccaccagagggtgcgccttggtttttctggtccctatttgctgctgatgcccaaacctggggcctggctttcttgccggaggtccctgataccttgaaacattctccacgccccctagtcctgaaccatcaagcttctccttgggtataggatcttcaaggcttgacccccagtgaccctcctgccaggatgcttggctaggactgagttcgctctgcccatcggccttatcttaagcctgaccttggtcgcccctgtgactcacaggacctgggtttccagagctccagccatctgagggcaataaagggaagtgactgcctggacctgactttggcattgcagattctgggaggtggctgttcgggaaacggcagccccacctccctgggtgtctactgctatccccagccatctcacctcttagggggtgcggggtcttcctcacgctgccggcggaggatggagccggcactgggggggaagggcaggatggagagccgattgatctccttttcactgtctgtggcttcctcctgcaatgccatgacagggcctgggtcacccccactgcccagcaccatcccagtcctcagcacacctggtttgtgcccattccacaaatgagaagtagggcccagagcagaagagc

SEQ ID NO: 70110 - DNA, 1650 bp, Homo sapiens
aacacatcagggaagagaagagagccattctgccacagccaggggagcacattccctcatgactcctgggctcccagagctccccaacaccccccacagacacagatgccggcccgcaaatgcagcctgccttttcaatggcacagagaagccccctctatccccagaagcaaagaaaatacttctcccattggccatgcctgaaattccaccattaaagaccattccatcatgcctttttgagttctggttcaaaggcacaccctgtgggagtggggacccacgtaaagctgagacggatcttgacacttgaaaaaggactcccccaggagtgtatggtgcacagaggaggggacagacagaactcggagatcaaagagcgcaggaaaggtgccaagtccaccggctgtgaccgggaggtcccaggcccagccggccctggcagccacatccaaccttctgctctaatgtggacccaggaagtgggagagaaccccaagagacaaaactctgaccccggtgtgggcaacgcggaccgccaaggcgcagtggtgggtggggaggaggcaggctggtgggcatacccagccggcccactctactgatgcggagaccgagccccagggcagcagagccctagcttcgcgctacacggctgtgggcgctgcgccccagggcacggccggcccaggtcgtggcccactcgggacccgcggctcaccggtgcggttgacgcggcacgggaagcggtaggtgctcagcacctcctcctcgtcctgctcgtcgatgacccggcactggcgcagatacggcgtgagcttggccgggttcagggcgcgagccagccgatgccggacgccctcgattcgctcccacagcgcgtcctcctccgcctcagaccccgagccggccccggcctcctcctcggcctcccccgcctccgcccggcccggcatggccgtgtcctcagggtctgcgggcaagaggcgcacgggggtcgaccagggctccctagggctagatgtgcggccaagcacccccggggcgtcgtccgcagacccgccgtcgggggcgcgccccgagctccccgcgactcaccccgcacgctacagtcgcctcgggctcccgggtccgcactcgggcggcggctccgccggcgcaggggggcggtgcccgtggcgcccccggctccgcccccgtccccgcagcctcctgggctgcccgggcctccccacattgccgcccgccccgggtcgtgcgtccggcccccggccaccccgcgcgtccgtctgcacgccctccctcccggccgtccggctgcgcctccccctgcttcctgtttcccgccggctctccagcccggctcggcggggtcctggccgcccgcccacacctgcccggcctctgggcggggcgggggcgggcaggcgcgctcacaccccccgcgcgccgcgacacaccttccccgggccacgcgcatcgcctccccacgcccacagcgcgcccgcccgtgcggggctagccgctcacgcccggcgcagcccgcgggcactcaagctgggcttgcccttctcgggtccccacatgcactgcgggcgcgggagcttccctggagcgcaggacagccccgcgggggacagcaatgggcag

SEQ ID NO: 70111 - DNA, 703 bp, Homo sapiens
tccaaattttgtaaacacatccctcactgtgctgtgcaagggttaccccgattacacggtggtcttcccctcccagaagcccccggaaaacttcactgttcttgtctaggtccctggtaactggcacagtgcaggagtttaataaacgagaatgaatgagctcatgagcaaatggtttccagggaaattgggccctggggatttctcaccctcctcaaagaacaaattatgcaaattctctgggaccaggccctctgctttcctcctccccactaggtttctgggagggtgtctgggctcaccagaaagtgccccgggctctctagtggcccgtttcctgattacaaatgaaactagggcttaaagctggtgaatcactagcaactgccagccagggcgtgctgggtgtcaggtggggtggatgggagaaggcaggctcacaaccagacttccctactactcctgccacccccaactttgccatcgtggcatgacctccccagccactgatgacactagctaggaaagagcctagctctgggggctagacaagcttgagcaactcctggactgtccacactcctatccctgagcctaccacccctgggtcccaggaacccacagcctgaaccattcgcaaacctctttcccaagcccagtctcaggtaactcagggatggtatccagggaggtactgtatccc

SEQ ID NO: 70112 - DNA, 2267 bp, Homo sapiens
cccaccacagaacagcctgtgcgagccgccccagcgcctggaggcaccgacccagagcgggtctcacaaggctgaaaacctggggtcttcccagggcagtagggcggcttcatggaactagaggctgtagtcccagtcccagtccccaggcccttcccctcgccaagtctgcatagccacatcaaattgtggtggttcctttaccaggctcccctctgccttcctgcctggggcaaaagagggcgctccagagccacagaaagtccactgggacaaatgacctcatccttccaccccagccctccactccctaaaacctcccctccttccctcacctgtgcctttctccaaccctatcatgtcactagcacttctctagaagtgccatgcctttggccaggttgtttcctgggccaggcacactctttcacaattttaggcttctatattgagagggtggcctccttcctccaggaagccctccctggctgcctcctctgagctagctagctccaatgtgcccccacggcctctgggggatgactgccccaagcatcaaccatgttgtgccctaaggggctggggtccgggaggggagacgaggacaggggtcacctacctccttttgggttaggtgagggagcgtgtgggggatggggcaggcctccctctgcccggcctcttctggaccagcgaccctgaccctcaggccctcggtcaatacccattgggcaactacaggatcgatcggctggggctgcctggagggggaggtaggcagggttgtttgcttccccaggggcacctttggccagccccacccctccgtggaggtctcccctgccggtctcagcctcttgacgtcctcacccctcctctgggattgtgcaggcagcggggggaaaaagagggaggcagcagcagatgggggctgacccgggagctggctcaacgccctgccctagggatggagagactgaggccgccagagcctggtcaagccagagctgaagcctccggccccagcgggacgggaaggaatctggtctcctccttcctggctccctcagccccgcccccatcagagctggggaggccccgggatgggaggagaggactggggcggggcacccagacttggagtggggcctggagcccgggatgcttcctgcggaccttcaactcccacattccaggctgttcccaagactcctcgctcctcctcccttctctacccatcccgtgttgcgggcgggggcgcgggtgttagtggccagggtctgagctagctgcctggggcctgtgggggtactcgggggcccctcctagggagggattagatctacactagaggggctgccctggaggcctgtccaagcaccacccaagggtacttgtgattgtcgtaaacaggaagcccccctttccccaccgcaccatgtagacaggccctgtgtgtccagacgctgcgctctggaggccgggggctcttgacctccccggctgcgtttcctgttagctgagccagaggagaaagaaggggactgaaatgggctggacaggggaggtgcctcagggagtgagagcagaaggggaaagagccaaggagtgaaaggccagagctgcctggcacacagtaggtggtcaatagtctgtggcctgaggttgggtaagaagggaggggcccctctgaggagagccatacagttgccgggaagagtggaggattcaccccactgccaccaaggcctggcacatagtaggtgctcaggaaatatttgagatccatgtttagagtaggccgggaggaggcgttcttggaagagagcagtgtttctggagaagaaaatgaggccaccccggccttgcagcccgctgcgggctcagcattcccccaccgtccctgtctggcccccgccccgccctgtggctgcctgggccaggccactgtctcaaggccctttatttttaaaatccctgcggtgttcctgccccaagactaaggagcagtgccagccaacagctcagcctgcggcctgggctcagggcctaaaggcgccaggggtggggcatctggccaccccacagctgctggcccagccggcctgcctgagcagggtgaggaggcccctggaatgcccccaccctgggcccgaggcattagtccttagtccctggtgaagggacagaggcccacaagggtggcaagcaggctttgcatgttgaatatagtagcttgttcctcccacatcttccaaacaaatacg

SEQ ID NO: 70113 - DNA, 659 bp, Homo sapiens
catatatagtagggaggttctcaacctcttgttctttcctgcctgccctccctgcccgcgggtgaagaagatggagcaagcatggggcaggttgtaaccacttccatcaggactgcttgctcagtcatctgcctggggctcacaacaccccaactagtaaatacccacactgctattatacccatttcagagatgagaaacttgaggctcaaatgggccaagtgctttgcccacggtcagccactgggccaggatttgagctcagggcctttgacattgcaccagactgcctcctttaccagccgctctagggatcctctgactagagtgacgtgtaattgattgtctaaccaggtcacctttgagaatgaaaggaagtgctattaataattacactggaacagtatgtgtaatctgggctgtcctaggcaaactggaaagtatggccatcctgccaaagtagggagctttacgcaaatcacttcacttatctgcaaaagggacaccatggcaggactttccctatggggctctcacaagaattaaatgtcataatgcatgttaatgagctacaggacctggtatgcatcaggtgctcaataagtgctggttactactgatgctattaatagtaataaccacagtagcactagttcttt

SEQ ID NO: 70114 - DNA, 5075 bp, Homo sapiens
gctagtccggaggcttaggagggagaatcgcttgaacccgggaggtggaagctgcagtgagctgagatcatgccatggcactccagcctgagcaacagagagagactccgtctcaaaaaaaaaaaaaaaaaaaaaaaaaaaaaaaaaaaaaaaaaaaagagagagagagagacttaactcaggtatcatctcctctaggaagatttcctgagcccccaggccctgcaggaagtattagggacctctctgtgccctgacagcccgaggactctatagtcagatgggagtagtcaaaggagggcacaacaacgggaggcaggggccagagatctatctcccctccttgaggatggcacagggtcccgggtatggctgattccctgccctccatggaggtgggcggggtggggggagggtctgtaaagtctctgagatgcgacttcatttacctgccgagcaagcctcctaggtgctcttggagcaggaaacacttcacacaacatctgatgctgctattatctatcccactttcagatcaggaaactgaggcagagaaaggtaagtagtgactgaggcaggacaggagcccaggctgtccggctccagggtcccggtcttgacggccactctaccccactctaccagtcgccccagtatggctgtcttcctcctgggcaccgcggggcctgtaccggatggaagggaatgagaatggggagcaaaggagtgggcatgtcatgcctgtaaacatcaaggtttaaaggcccaggcattcaaggcctcagatcgagcttcccggttccccgaactcccgcagggcgcggctggagggcccaggagggaggagagttcatcaggcctggacgccccaagcaaggccacgaggggaaccggtggaagaggggttggcggccggggaccggagtcgcctccccggggcagcccgcacgttccccggctggccttgtccggggtggcgagcagaggcctggcctggccccccagccgcgtccctgccagctctcggcggccgcgaggacggtgccggggagggggccggggagggggccgggccccgcccgcgggcgggaggagacgggcgggaggcgggagcgcccacaccccgcccccgcccccggatccagcccgcggagcccgcggccagggcggcgcagaccggcccagcgactctcccgggctgccagccgggacgcgcggccgccgccgctgcagacgacgagtccgccctcgtcccgcgcccccggggctcgcggagccaggtaacagcccgggcgcgcgggtcctcggggcggaggccgtggaggccggcgggtcccggcgcccgcggggactctgcaccctactaggctcccggggccggaacggggacgggacccgcccgggagaggcgcccccgggtgcccacaggaaggccgggcgcggccgcggagccgcgcgaggaaactccgagctttcgggcttcgtgtcccgttccaggctggtggagggggcagaggatcggacacggctgagcggccaaaatgcgcgaggagggggcgagccgaggggcagagcgggggctgtctccgcgccttcctgcgcgggggaaggaagggccggggcgggcagcgggcgacgcggcggaatgtctcccctccgccgaggcccacgcggagagcgggaagtggggggtggggggcccggggagatggacaggcaccctgcccccctccccgaccgccgcattccaggctggagccgcggatgaggtcatcccgtccggttcccctccggccaagacagccggtcgtccccttcccccgcggagcgaccctccgcgtcctgagccccgtccccccagggaatgttggatggccgaagtctttcccggacttccaatcccggccgccctccagattgttctgcctttgccccagcagtgccagacccgcaacattcgaagcccttttcctagaccgggaaactgaggcttagagagtaggggggactggccgggaggccgcagcggcactaaacgtggcgcggggacccgagacgcggcccgcagccgctccgtctcgctcggtcccgggctggttcggctctaactcggggcggtgggcacgaagcgcgtctcctttccactttccccgtcgctccctaatggcccacggtgccccccttggaatacggaggaccgggtcccctagcgcgactgcgaacaactagctaccccgttctggcctcagtttccccgtctctccaccttgaagcgtctggactttgaggagcaggagaagtcagccgaccggtttaaccccttattccagggaccagagcaggtttgggggagctgccgtaaccatgacagggacccgctgtccagcggtgggggggggcgtcacccagctggatgcccgcaggaagtgggctgtgtgcacccgagcagtggcctccaggatgagacgtgggcccctggccagcactgcggcctgcgggtgacccccaggtgaatgccagggtgcagccgcccccgctctccttcagacccgcccttggcctccccgcgaccacatgtgcctccacagcgacccctgttggcccgatcccggctccaaaacttgttcttgcgtcattcccaccattgagtgagctcaggccatgtgcccaggccctgactatcctctatagggtaaatataaggactccaaggacactgaggctgtgtggtgacctccttgcccaggtcacaggcagtgaatctgcagagctgggtctcctgtcttcccaggcctgcacctgcaccccacaccgggctcagcactgggcatccaagccctccaaatcgtcttccccattccccatcgtcttcacccccaccctggggcatttaccagcaatgttggtctgtgactgagggtaaatgtctcctttctgagcttcgttttttccatctgtgaaaggggtgttctgaacactaacgggcggtgttcctgagcaggtgaggggaggtgagcctggcaccaggacacttggagccctgcttactccagtgccaggtgaggcacacctgatggccagcagtgccctgtggttggcagcaagtgccacgtggctgccaccggggtccctggaatgagagatgttagtgtaaaggtgtcagatttgaacccatggctgccctgctccagtatctgagggtttcattacattttctacccttgcaactcccctgggaggggaactgcctggtgtgctgttccgttttccacatgggaagaccgggtcccaataccctgccctcagctccacagcgctgcagagtctctcgaccgcagtaggcagggtagtgtgaggggtgggtactattgggggggtgcccagaaacatttgaaagatgggatcatcgcaagattggggaggaagctggtcccccaagtcaaaagtgaccatgggggttcaggggggaggagccccttttgctgggagatgaggtgctgcctcaagaagtcagggaggccaggtgtggtggttcacacttgtaatcccagcactttgggaggctgaggcagcaggatggcttgagttcaggaatttgagaccaacctgggcaatggagtgagaccctgtccttacaaaaagtggaaaaacttagctgagcatggtggtatgtgcctgtagtcccagctactcaggaggctgaggtgggaggatcgcttgagcctgggagttcgaggctgcagttagctgtgatggagccactgcactcagcctgggtgacagagtgagaccctgcctcaaaaaagaaaaaaaaaaaagtcagggagctggggtgggagcaagtgggtaaggccacatggcagacccttctacaggacattgtacagaggaacacccttcccgctcccattccttcccccagagatgcatccttaatccctgctgagcagggaaacttggccctgccatgaacctgtcacttaaccttggacaggtctcccttccctccgaacctcagtgctgcctgtcaaataggccacgctgcggctttgcagggttgttggagaatcagatgacatcatgtaatggttggccaactgtggatcgcttcagaacttcagcaaacattccacgaggacttctcggtgccgggggtgccagggagggaagaagatgattcagaagttcccccccacgagggggaggagttagggttgggggaggatcagatggtgggaagggaagagaatgtagtcagaaaacaaagcaagctttgtcctattggcttctttgttcttatcttgttatttaacctattttgaatttcaaataacattagaagggcagtattgagatttctatgcttggaggtggcagcaatggttttaaaaaaggaagaaggctgagccgcagacataggtgttcttaaggatcattattgacttttatcagctgaggtcccaggtctgtgtaggtaagtgacttgcccaaggtcacattgtgaggacacagagcccagcctgccctcccactctcagaaggggccagggtgatgttttggcatgcaggttatcatggagatctgtgattcagctggcattgatttggcacttgttaagtgcagagcccaagctagatgcccaagggagaaaggcaggaaaatccaggcggcctccccaccctccaagtgcattgccgatctcgggaggcgagactgggctccacaagccagtcaagggcttatgtgagtcagaggctctgagttcaagtctcaactagctctgtggatctgacctctagccagctttgccctcagtgggccacaggaaaagcataggatcacaggtgcgctctagcctggactttgtatgacactagaaggaaaggggtcagaacaagagatgcttagagaagctggagcaggggaggatgtgtgtgtgtgtatggtgggggtggggaatcaggaaggagagatgcacaagaaatagcttttggcaccagctgagctttttccaaagcttgctccctgacagcaaggctcctacgtcagtttgacaaactgtgataaagtcttt

SEQ ID NO: 70115 - DNA, 1197 bp, Homo sapiens
ggccactccagctacggtgagggcctgggccatcttggcccacttttcagaggctgaggctgaggcccagaggggttcagtggctcctccaagctccaagtgagctccaagtgaccacagaggtcaggcccagaccccacatcatggatggggagggggtgcagtggtgggaacaagctgactccccaaaacacctgaggttgagagtgaggaggtggagtttgaattctagctgcccctcacttgctgtgtgacctgggcaagcacatccccctctctgggccttagctgaaccagtcacccacccattcttgcccccttcaaccaaagccttcccctcatgtcggaatgatatcatggagaggtgaagggcctgggctctagattccaatccagttctgcctgaatttcaggaagtcagttgacctctataagttcaagtcctcgcctggataatgagtctctcggggtcattgctaagattcagtgccaggagaggcgcaggggggctgatacttagtaggtgctcaggacactggagctgttgttatctgaacttggtttcctgtaactcgacaaatttgggaaaccactcacaggaaccgcaagccacaggccttcctgcccagccagaagtgccaccttggccgttcggtcagagctcacctgagaaccatgggcccctgctgccacctggtggccactccctgccttgcgggagtggctctaacacccctgccccaggcggctgctcagaaccgcactgaggactggtccacagaaacccgattctgtctcaggtctgtagtcctggaagcaggggctggacatgtctgtccttcatttctatacagtcagaccctgattgctggtcccatcctgtgtccacaaaccagctcacgtgctatgggttcacctgcagccatcggccagcgtcatggcagggagccggtggccatggctgaggtcacagttgggactgagaggagatttgagctccagacttgattccacctcgtcagacttctatggccttgggctagctccttcgccccatcccaaactgagcctcactttccccatctgcataatggaaatgaggataatgatgattttcagctttcggggtagacaggaagatcacacaggtgaccatggagtgtattctattggaaagatgggagaaaccgaggccag

SEQ ID NO: 70116 - DNA, 2871 bp, Homo sapiens
aacagcatcagctctgtctgcttcagtcccctcccctccagggagtttagaaagccaaggatcccccatcaaggcccccagcagggaagggaagtggacgcgccaaggggagggtaatgagtaaccaggctggaacgcccctgagataagaggcccaggtgggagcccttatctgcagttccgggaacagcccctggcccaggtgcctgggactcgtgtctgccccataatcccacagggcagcatggcatttgctctggcgatagtgggggcaagtagacagaagcaagtgcgtaggactgttgggagcatgtctcagcctcccaacatggcagccgggtgtcctcatatctgtttcctcctcagtattatgaaaatgccaggagcattaaaatgcacggaaagagaaatgccctccttaggtatcggaagaccggttaaatttagccacaaacagctaacgtgaggtggtgcactccctgtcactacaggtatgcaaccagaggatgtgtggcaggaggcaggatcactacgggacctcaggatccctgagagcaggacattctggatcatggggtgccttcattcagaggtcctcagaccaggggtatcccatgtttttgtaaacttgagggacccaagagagaaaggagtcacaagccacagttcttgccacaggaagactcgataaaaacagattattttgtttgcttttagccctggggcaggaactgcaggtagggataggggaacacacccaagctctgttgatcctggtgtgactcggaagaagaaccaggacagagaatctcggctggaagtcttttattcttttaacttgaaagaggacatgttgaacccgccccttacgctcaggtagctcaggtggctgtgacccagcctgttgggaaaagtcagctcgtgcccatctggcagcttcaccttgaatttgtcactctcaaaggtcactgtgaactgtggggagggagggtgtcaaggaggcaggaggccctggaaatgggccagggcagtgcctgatggctcaaacaaggccagcacctgtgtccaggccaggctctcttccatctgggccctccccttgacatcaccccagtgccctttccccctttgacctcaccttgacctctgaccctgggctgaagcacaggtgatcttcccgttgttcttgcccccagttgctgccgtccaatgagttgcagacaatggtggattcgctgaagcgagggttgaaatgcaggttcagcttgtctgtcccctggcccagattaattacaaagctgcaggagaaggggtagcaggtgaggttcagggctcaggcctggataaagcagcttgggttggaggaccttggttgaccacaagctggaagaatcaaagcttgtgttagttgagatctgtgccttaaaacaagggaggtaacaacctgctcagacttagcactgtggtagcacattccatttggagcagggatcacgctgttgagagaagggtaactgatagtgacagcttcgggaattgggggtggctctcctgggagagagaaatgctatctcttagatatctgaagacctattaaatttagccaccagcagccaacctaaggtggtgagctccctgtcactatgggtgtgcaaccggggttgtatgacttcttggcaagatcactacaggagcctgggctagacctgcagggttcctgaaagtggggcattctgggtcatggggtgtcttcatttgggagtctcagaccaagggtatcacacattttgacaaacttgagggacccaagtaggagaaataagtcacttttcccttagctcctatggcatgcacctgcccgccccctctctaaccaaaagtagataaagcacagttccaagatgcgctgacatgttctgcaggcgagagagcctttcgctggactgtgactcacggaggtggtgaggccgctggttctaaccaagaggatgccagcgagaccactcagcctcccctggtggctgccctggtttaatgctcatgaaatgccagcctgtggccattctgctgggtaaagagggtggtgtctctggggatttgggcgttccctagaggcacctgccccgcagggggccagacagagttccaggggcttctccacctgccccttcaatggctgttggggcaaaagaatagagcatatggcatcaactctgaaattctgcaggtccccaaacctagcctcagacatgaagtgggggccagcaggggtgtggggagaagggtgtgaaaaagggcccattggcctgacgtccctcttgcctgagcacttcacagggctgccctgcctgccccacccgccctgcctattccgggcctgcagactcccccaaccctgaaaccttgctcacccatcagtgccatcggcgatgctgcctgtgatcttcagggttgaccccggcttcatgtccatgttcttaacctcaagttccccctgggccaacagagaaacattccactcgagtccccacagaaaatcaatcccacacttgcccagcagcttcatccacctcatgccaacccagctgcaggtctcaatccccctgcccacgtgaggacgcaggagaccaccaagctggaaagtggcagagccagagcgctctgatcaaggcctcccagagcttccccactccctgccctgttttgctcttatccaccccaacccgaagaggcacaggacggaggctcagtttgcccatctatgaaatgggcagagtgcttcctgcccagttccgcaaagtgttcaagtgatgaaatcacgctgccctcagcagaaccccagaaacaaaaatatgatatggaaaatgactg

SEQ ID NO: 70117 - DNA, 710 bp, Homo sapiens
cctgtctctattaaaaatacaaaaattagccgggtgtggtggcacatgcctgtcgtcccagctacttgggaggctgaggcaagagaatcgcttgaacccaggaggtggaggttgcagtgagccgagattgtgccaggcgacagagcaagactctgtctaaaaaaaaaaaaaaaaaaaaactcattacccaagaccagttttcgcatctatgaccagagggtgagggttggtctgaccaggacgcaacaggcaccaaagatttagaacaacttatgggaggacacttttacattgtgggagttctgctcactgactttttatttccagaaaaagcatgatctgagatgccctgaatgagctcattggactggggcactttgccagaagtcaagggggcagtggccatgggaggaccctcagtgccctctcgctggcagccgcctcctctctgcagaggaggaagtgacccgctggttggtcacatgtaggggtaggttgttaggtattgctcaactcttccacaggcagtaagttcttttttttttttttttgagatgttgagatggagtctcactctgtcacccatgctggagtgcagtggtgcaatcttggctcactgcaacctccacttcccagattcaagcaattatcctgcctcagcctcccgagtcactgagattacaggctcccaccaccatatctagctaatt

SEQ ID NO: 70118 - DNA, 3347 bp, Homo sapiens
tgggagagaatttagaaaagcatcccagtcgctgaatggttgagtttaggggaaaaactgacccagcacagccccctcatctcctggatgaggttactgcggttccgcaaggtgaatcgaggtcagtcgccaaggcagaaccggattcgccagattccctagtctcagtggagctttaaccctcccaggcacaggaccgctggagaggtcgccacgggccggtttcccagccggccgcgagggggcgacagagtgcaatggacccaggtgagtcggggaccaggcgccgccaggtcgtgacgccacaaggtgagggaggtctttgatggagggagatacaggagaaaaggcgccgagcttaggaagtctgttcgtactgtcctccccgattccagtctggctcccactgctatcttcctcccactgctggacccttctaaaacaaaagcctgactttgctaccatccgtaaaactgtaacgacacctccaacgttgcttacagggaaaaaaaaaaaaaagggcagcaaaacatgggacctgggtgatcttgccccagcctaattccaagatatctcctgcaaatagatatctatttgcagatatctgggagccgtattgaaatacttccaactccctggactcatcctacttttttttttttttttttttttgagactgagtctcgctatgccgcccaggctggagtgcagtgacgcaatctcggctcactgcaaccttcacctcccgggttcaagcgattcttctgcctcagccttctaagtagctggcactaaaggcgcgcccagataatttttttttttttttttttttagtagagacggggtttcaccgtgttaggatggtttcgatctcctgacctcgtgatccgccctcctcggccttcatcctactttttctccctgaatatcttttcgcaccagctctacgtggagaaatccgactgtctttgagcgaagtacagtatcactttctcttgaaacctcccctgacacgacccctcccctgacacgacccctcccctgacaacacccccacccaccccaccccagtttgggggaggagccccctcctttgttcccactaccccgtgggcttcccctatcacactgtaataaatatctggccttgtctatctccttctgtgcccatcacagagcaaagcaaatacaaagagttcattaaacgttggctggatgaatggaggagacggcacagggttcaagctctgctacttgtgcggcctcaggccgactaattatctggtgggtttgttgtaaggagtcagaactaaatggattaattacaaatagtgcttaggacaatgcccagaatactgtaagcactcaagaaactgatttattttcgtcattttcacagcggccaaggtacatgaggatgtagcttatcgcccttttaagggactctcccacgttcgactctaagcggaagtacccgctcagggctccggaagtggcctcagagcccctcagcaacatgcccgcagagaattcttccggaggcggtcacagacatctccgtgacgcagaacgagttagagcgtcccttggggtttccatggtgctgcccttagcctgcagtatctccacttcctctcccgcctgagcgccgggaacggaaaagcaggcggccggtcccagctgcgacgtagacgccgcgtgggggtggggttgggcgagtaggtgacgctctaggcgagctcgttggcctctctatggtgccgagcgcgcccgttcggacgttgcccctttaatcggcagagggcggtgcccaggaggtcccgcgagagctgcggggggcgggggggcggtgccgaggctgggggccggtggcggatggagcccgcgatggagccggagactctggaggcgcgaatcagtgagtgtccgggaggggcgcgggccggaccggaaccggaaccgggggcacgaggcgggccccttcccggcgggggcggggtacgggtcgccccctcctcacgccccgcccccggcccgggaggggcggtgtcctcagtcggcccctcagaccctggagcgatggaggaccccggccccggcgcggtccagcggtgggagcgggcgccgcccacctgtcggatccctgggccatgacccctgggacggcgagtgagctgcgccgggaacccccgggacggagagagcagcctccaacccccaaggctcacattgcttcacggagtagcggcccggggaaggagcacgcgagcggttccccggggttgcatctcacacccgggagggagggaccctactattttcaggccccgaatcctccactctctggccctgcatggcgttcctggagcccgcaagtagtcacatttgctcattaccccgtcctggaagggaggacccactgccccatttgattcctcccgccgctcctagtctctagccacatagtgagaaacccccgcaccctacaggcttgggagagtcttagactccagaagtattaataattccaagctccctgtcactcccttcagcctaacccctcagtctccaagatgcctttcccagctcttgctgaacttccttcaaaggcttctacacccctttttttcttgtttctcctcagacgtagcttcctattgcttaggcttcctagcccgcaaaccctccacctgagctccttaacccacagccctgatgatcccctgctctcacagccccgctcctggactctgcctctgaaagccgtggctggcttctccctggtctagtgagggttctctcccaaggctttaactgctgttgggaccccgtcgttgccagggcctcagggaaccctcttggacccgggcacaccggcaactgtctagcgtggtttggggtcatggccggccccttttaagccaggcttgagcagagttgaaccatgaggttggccccagaaccaaacctctagggatgtttcagagtcatcctagccaccagaggggcagggggtggaaaaggggcactcagcagcccttgaccgttgtgaacgccggaagtgtccgcctgggtctcagcagcaactgggctggggggatgggtgggcccctggctaactgatctcagacacaggtcttgagctgtgggtcatacaaaacattctcaggtttagaaacagtgggggttttctgagagtccagagagtctaaaaccaggcagaagttagagatacctgggtttggctgggccctgacacactggggctgggattttctcctttccttccccctttgtgtcctagcagaattgtaagatctttcctcttcccttgtggaggctggagg

SEQ ID NO: 70119 - DNA, 762 bp, Homo sapiens
tgagcagcccagtgcctcagtttccctgcttgacgacgagctcatgtctctgggtgaggaaggggccaggcctggaggagggcgggctcagcagcagatggggcatgatcccagggcccactcacagctagcggaaccacgtaccccaggtgtggatcctgtggggcacgtggatgagcattaggcccacttcacaactgaggaaactgaggctcggggaagttaggagcttgtgcgaggccacacggccagagggtgaggctggcaacctctaagccggcctcggataagctaaccagcattcaggctctggcagcctggggggaaaccaggggatttccccgcaacaggttagagcctggaattgagaactgtctgggcaaaagttcagcagtttcttcatccaccaagaggagagggagggctctgggctccagagcacccagaggctccagagaagccgaggccagagcgcgagggactcggtgatccaagctggtccagggccaggcctgctgttactcccgggcaggctccggctccagagcccagcaggggccaggcttccccggggggaagcagcaaagcgttcccagctgcccaaaccatttttgggtttccaactgctctcagggcagcagccccatccgagagctgagatcagaacagcctcctcctgagagccactgaagggatgaagagcagatacgttagggccacatcaaaggaatcctcagggatatgttggaagccaagattcag

SEQ ID NO: 70120 - DNA, 481 bp, Homo sapiens
ctaggactacaggcgcctgccatcacactcggctaatttttgtatttttagtaaaggtggggttttaccatgttggtcaggctggtcttgaactcctgacctcaggtgatccacccgcctcagcctcccaaagtgctgggattacaggcgtgaggcactgcgcccagccggattagtcacacatttttatgcgaagcattgaaataaatgagaccttgaacttttgaagccataccgcctggcttcacatgccacctctgggcaggccactcagcgtcatcatctggaaaatgcagactgtaacaatctctaccctgtagggtggctgctgaggactcagcttggctcagtgcccactgcagggttggcactcagtggataagctgatttaactgtgacaatgttaagaccattctgggcggtgtctttcacactctttggaaaccctgggctggagaattctcagggctgggtgcgttct

SEQ ID NO: 70121 - DNA, 2158 bp, Homo sapiens
ttcaaaagcatttgtcaagacattgaactgtacatttaagatctatgcattttactatatgtaaatgatatctgaaaataagttcccaggggactctaacgcagtgtgaagaactactggtctagaccgagggctccagcacccaagaagacaccatgtgcctcgtaccccatcgtacacacacgtttcttgggacttcgctctgaactggagcgtccacgattcagggggcaatgagattcgacccaaaggcagttcatttaacatctgtttttctcccagcaaccagctcgcctaagcttctgattggctggagggcacggggcctttcgcttcgcgttttgtttgtagattcttattggttaagaagagcgtcagtctcccaccgcgtaagagtgtagtcggcgttgaaactcggcggcgactggtccagcagaaccagggacggggagaaggatcaagctagctcttcattggtcccttcccctcggtgttggccacgaatccgcccctctctccaagttccgttagctcgcggcttcgctcctctcccagactctcgcccccattggctgcaggccacgccgtcgccccgccccccggtccttccagcgcgccaattggcggctgcgtggaacgtgccagggagagcgcgccgtgcccgcggagagagcgcggcgcgggaggccggcggccggccggctgcatggcgcgctgcgagaggctgcgcggagcggccctgcgcgacgtgctgggccgggcgcagggggtcctgttcgactgtgacggggtgctgtggaacggcgagcgcgccgtgccgggcgccccggagctgctggagcggctggcgcgggccggcaaggcggctctgtttgtgagcaacaacagccggcgcgcgcggcccgagctggccctgcgcttcgcgcgcctcggcttcggggggctgcgcgccgagcagctcttcagctccgcgctgtgcgccgcgcgcctgctgcgccagcgcctgcccgggcctccggacgcgccgggcgccgtgttcgtgctgggcggcgaggggctgcgcgccgagctgcgcgccgcggggctgcgcctggccggggacccgagcgcgggggacggcgcggccccgcgcgtgcgcgccgtgcttgtgggctacgacgagcacttctccttcgccaagctgagggaggcgtgcgcgcacctgcgcgaccccgagtgcctactcgtggccaccgaccgtgacccatggcacccgctgagcgacggcagccggacccctggtgagcgcgggaatggcggggaaactgagatgggggcgacctgcgcattcgcctccacgcctaagggtgaggggcggggaagaggcgtctccaggtggcaggtggggaacaggagagtgcgagggaggcccagggtgctttggtgtggggggcggttgatccctgtagccgtcatcctgtgaggcgcagcagtgtggtccctgttggacagatgaggaaactgaggccctttgtaacttagggagttgggcggaattctgccctacccaccatcggggtggggttggagaggaagcctgggaggattgtccccctgtgtgagggttgaaacaccattcccagaggcagggtgtaggcaggtgtgtggggagcaaaggcggtggagtttgacctcagttccaggtccagctccagcttcacagctgtgtaatcgtgttcagttacataacctccaagcatctctgcctgggtgagaaatggcagtgctcagcatgcccggtgacggtgatcagggtgagtgcctggcacatagtaggtgttcagatgatgtaagttgtagccagagtcccccatgttacagagaacttaatgaaacagctttgtgtgtgttcttctttggtttccaaattactctggagatggaagttattgtcccatttctcaagtaaagagactgaggcagccggatgcagtggcaacagcctgtagtcccagctactcgagaggctgaggcgggaggattgcttgagcctaggaggtcaaggctgtagcgtgctatcattgcatctgtgaaaagccactgtacttcagcatgggcaacatagtgagaccttatctctaaaagaagaggaaagaaactgagactaagagaagggaag

SEQ ID NO: 70122 - DNA, 2731 bp, Homo sapiens
gactccatctcaaaaataaatatataaataaataaaaataaaaaagagaaaggacagggtgcacagagccaggaccccaccccctcctggtctggaccaccctgggccatctcctaagcttgacactctcaggcctgaggctgtcaggccagggcgctttgactatcccctgcctgcccctgaacgcggccaagcccgaggccttagccaagccctgcagcctcaggcttggcgcccggcccagcctttctttagccttcccgaggagccagcgagagagcgctgcagcagccgcagtccttgcttccggggaaggcccgggtggggccagggcctgtggttaagtcagtggccctctgcagacgcgcacgcagcaggagccacgccctggtccctgcccgggagtggcctggtctcccccagctctgattccctgaaggaccctgcacctcctcagccatcttctctgggcaccccctgagcccagcctgctggccacaggccccttcccgccaacttgtgggcctagctcatcatcaaactattttccactggcttcccccaatctctgccacagcacaattttggtggggaggtggagagggatgaaggagaataggaggtggagcttggactctggccgggggcggcggggtgagggggggcagcagctcgccactctgattggtcacctctgctccaaaactggcttcaaaattccacggactccgcccccagtggcccccagccctatcctgacttgcaattggctgaactttcagggggcggggctcacccggtccggtccagttaaaagggtgggagcgtccgggggcccatctctctcgggtggagtcttctgacagctggtgcgcctgcccgggaacatcctcctggactcaatcatggcttgtgtgagtgtggggacccccccccaaggtccaggggatagggcaggaactgatggccagaggagagctgggcagatcgggagcagattctagccccagctgtgtggcctggaaccagtgccttctcttttctggacctcagtggccacatctgtaaaatgggggtgggcgccatggtccctcaaggccttctctgcattgataattgtctggattcctccagggtctgaaagcacagttatttctgcccagggttgacattctgcagctctctgagaagtgagcgtgggaagggtgtggccaactgggggacacccaggccactatccctttccccctcctccaccccaaagagcctcctgtcccctcccccctgcagctgtcccggtcaccaggccagggcagagttaccctctgctccagagaacgctgaaaagttgccaggacccgagacaagctgcccaggatgggcccttctaggtcgggggtggagggtggttgtgtccaggctggtggcggggggggcgggggaaattcccttccaccacccccaagctgggaggttggggtggcagggaggtgagaatcttcctcgggccccagggaaagggttcaagtttctggcagaagaaaccactcaaaccagttaactcttgcccacccactcggggtgccagggaacagcagtgcccagcagtttgctcaatcttgttaaccctgagccagcccagccacagcccgactgcagggctattctccctaatgcagagaggccgtgtttttcagggtctcctctctagcccctgggcctctttgcagagaggggcttgaaggagaatagtggggtcgcccgcccctagccacttcctctccagcagaggggccggcccctccattcagtgtgacggtgggccaagtgtcggcccctccccagcctgatcctctccatctgcgatgggacagagcaccccatctcccaagtcactcttgagtccaaaattcccaagccaatctgcaaaatcttctagagcctgtcttctagaaccttcacgttacagactgaagccaaccccggtgggaatagggactttcccaggaccacatagacaatcggaggctggaaattacagctcaatcctttccccaggcttccccttggcttggtcagaggatgccgggcgggaacaaccccactcccacccccagccacccccggacacttcgagcagtggaggccttgtcctctaacccggctgggccggggcttgtctgtgcagggtctggtcgccagcaacctgaatctcaaacctggagagtgccttcgagtgcgaggcgaggtggctcctgacgctaagaggtgagaagtgaagtcggggtggtgggcggcagggacgggcttggtccagcagggagggcgtggccggccaagcccacatctcctccctggccgggagcgggttaacggccagccgccgatgctgcgttttctgggtgactcacttcccccgcagggtctgggcgcccccaccgttgccgccccctcccccgctccctccctgctgtagcctcttaaactaaaccagctgcagcctcgtcatctgtaataccttgactcccccgcccccacccctttccggtctgggcgggacctgtcgctggggagggcggggagaggagtggggcgggcgtcaccgccgccttccccctgagtccctccttcctgcgtctggtcattcattcattcactggctcagtccggtccttcttccttcacttctcattcactcagacggctgccttattttctcggcagttaggtg

SEQ ID NO: 70123 - DNA, 722 bp, Homo sapiens
aaatacaaaattagccgggcatggtggcacatgcctataatcccagctactagggaggctaaggaaggagaatcgcttgaacctgggaggcggaggttgcagtgagccgagatcgtgccattgcactccagcctgggcaacaagagtgaaactccgtctcaaaaaaaaaaaggtaacttcctctcaggatcccacatagatttcccaagcagaggagctgtatggaatgaattcagcattctggagtgctgcacttactgcctgcctccttccaaaactcagagtcagggtacaaagatcagctgggcgtgctggcaggtgccagtaatcctagctactcaggaggctgaggcaggagaattgcttgaacctgggaggcggagactgcagtgagccgagatcacaacactgcactccagcctgggtgacaagagcgaaactctgtctcagaaaaaaaaaaaaaaaaagcggatgaaggattctggcatacaatccaagtgactaaaaatccccttcaggcgttgtttcactgcaatctttcacaaccatgccctcattctcagtcaaggatgttattatacactcattccacctttgggcaaagtgaggcacaaagagggaagatggcttgtgcagaaaacacatgtatgcgtgccttatgttagacaaactttacataattaacttcctcacaatcacagctgtcaaggtttagtccacgg

SEQ ID NO: 70124 - DNA, 1401 bp, Homo sapiens
ctggacgacagagcgagactccatctcaaaagcaataataataaattaaaggaaaaaaatatccaaagtagggttagtacaggaaatttgggccattcacgagtaactccatattgagtgtgtgccaggcacagtcctaggcagtggggtccaggggacctcgctctcattgaagcgaggctggggaggggctggagctgggagtcacggagagatcagggaccagcgcgtcatgcatgggaagagggaagaaaaggagctgggaggtccctttaaaaggctgggcctggtggacggaacttcggtgcgacgctaaagtgtgcgcccgggaggatgagtacgctacacccggaagtgtcttcagggagaggaagccggcggcctcactgctatgggccgcaacaagaagaagaagcgagatggtgacgaccggcggccgaggctcgttcttagcttcgacgaggagaagaggcggtgagtggcaaagccggaccggactcccctcgagctgttcttcgcggccaaggccaggtctggggccgagcacgctcccgccgggggctcttccggtcccgccccctggcgtggctagagaacccctctcggccttccagcccgcgttcccgcttctcccttctcggccgccaccttctcccttcttgacctccccacctcgcctagtgtctgtgcgccgccagatagccggaagctcgggtctcagagcagtggcttcgaccaccctagcccagcccagtccatcggtccggcacacagcaggcgcccagccgtggttgataaatgatgagccaatgaaatgagagtggcttaagttcattcattcgctccctagacatttattgggctcctttggtgtgccaggtcccgtatcaggaagcagaacctctgagcctcagcgtctggccagataaataaatggcacatggtagcgggtcagcgaaaagcccagtgctggaccgtgggacaaaatgggaacagagcagctagcactgtggagatgagaaggggctgagattagaccgagggaaggaggtagggaaatgctgggcatcatcaggaaactcctagcgtgcatcaacaggccctacaggcgagtttagggtcaggtgtcctggggacatgggtgttggtccagtgcagggtttccgaaggtctggatggtggtggccctgaaaaccctgttgagagagtaatgaggtttgtaggtgtggaaggggttacctcatgtactgtgtgtggcccccccccccacccgccccacagcctggccctgttgcctgaacctgagatccctggagagtattgagtggaaagaggcagtatctcccttattttcctaaatgtatcctttctctaaccttgggcaagtaacctagactctgt

SEQ ID NO: 70125 - DNA, 637 bp, Homo sapiens
taatttttgtatttttagagactaggtttcactatgttgtctaggctggtcttgaactcctgagctcaagccatccgcctgcctcagcctcccaaagttctgggattacaggcgtgacccattgcgccctgcccaatcccatacttttgaaggtgtcgttccagcatggctcctcaggcacaggcccaccacagacagcagggcctatggaggcctgagcagagtttcctcatacttccctttttgctgcctcactctgggtccaccacagggtggcctttttcaggcttctcttcctggttcagttcatcgaccaaagacatggctccatttgctaactgagacccaaccaaaataaacattcatggagtggttgggccttttgttgtgaccccttaggtagaggaagggagagatatgcccaggttctgtttggtgtttctacctgtcaatagagataccacgttaatcattaacagccatgcctcccagttagtaagcaagacaactaactggaactagactttttacacaagttagagatgatcttcatcggatgcgtcaacaatgcctgaagcccagtgtcttagaaacaacacttgcccagggtcaggcgtggtggctcatgcctgtaatc

SEQ ID NO: 70126 - DNA, 1901 bp, Homo sapiens
gttttctcattagcaaaataagacctccctcccaagtctgtggtgaggacgaaaatcgactcttggcgagtgggacccgctgagtcgttagtactgggtgctttgccccggtccccgccaaatcacggcgccgagccctagcggacccatcgctccggggccgggtcgggaagcgcagcctgggcgagtcgtgcccacgcccggccgcccgcatcctccgcccccgcgccattgccggagtcacctgcaccctgggcccttccttcctcccagcgcgcccgcggcccgggcccgcccgccctccggccgccaccgccctcccttccctgcggccccatccgcccaccccgccgtcccgccgtcccgccgccccgccgccctagcgcgcccgtcccgttgcggcaggtcccgcccccggcccgtctcgcgcttccattggcccgccgcggcccccgccgctgtttgtctcggcttccccgccacccattggcccgctcgggtcctcccaggaagtttgaaaaaaaaaaaaaaaaagttttatgggcggatggaaggggccggggcagcgtcggggaaaggaagggccggaggcgcggcggcgggcggccgagaggggcggcggcggcggcggcggcggggttcccgcgccgcggagcccggcccgagagccgcgtccacgttcctgcctcctgctcccgccgccctggggcgccgccatgacggtgagtgccccagtcagccgcccgcgcccgaggccgggagaagggcgacgacccgaggcagagcccagcctctcccctccggggcagccccctcctcatttcccgaaggcgagaggagggctgggccggaagacggggccacctccgaagcgctttcggccagaccggcctcacccttcccgcaggctcctcctcgccttccctcgcccactcgcccccgggagcccaggcgaccctgaggggacggaacgacccgtctcgggcgccccctcctcacacttgcggcaccagtcacgggtggattcggggcgaccctttcccacctcccctccagccccctagacgaagacccgattccccaaggcggccaggggccccagggaggagcggaggtgggcctgggctggggaggggcgctcgtgggtgcggatgggtcgcgctgacccgggcctgggcaagccagccctccgtgtggccgctggcccgaggtcgggtgggcgagaagtggccggaccgccccacccacagcccgggaggcagtcccgggacgtctgaagcagcgggataccacgtcttcctgggcttgcactttgcagcggtcctggggccttgggacaagcctgcgagtctgagtagggggcatgatggcaggggtttgcctttctcatgggggtgagctgtacccaagccccatcaattacctgtgccatagttagcatattgagcctcacagctgggttcgctggactccccacttcacagccagataaactgaggcttggggaggggcgctggtgagttgcccgaggtcaccccaagtataagagaaggagtagctcctttccctgtccttctggcccactgaccgtgatgttcgggaagggaggggtggggctgcttttggtttctggctagtgcttcagggaggctctgacagcccagtggccctcctgggggaggatgagcagggtgtgtgtgtgcacaggcggcagtaggcctctttcaggggagtggagaccctgcggaggagtgggtgggctgctgggggcgggctgggctgctggggggcgtggcacgcctagcccctgccctgtgagtgtgatggcctggacttcctcggcgtcctcctggacatcctgccacctccctgctggcccttcctgtcgtcagcagcctccc

SEQ ID NO: 70127 - DNA, 2300 bp, Homo sapiens
cccagcctgtgactggctccacctcccatagtctcctggagccgaggaaaggacaggactggcgggcccatgggagggtccgtggggcacttggtcctcgtcagagggaggaactggacagttcgcgcagtgctgctggtctggactgccctctgagctctcagggggtctctatgcaggcagagtcctcccagcccctctctcccattcttgggcgaggggtcggctggagagaggcccctgggacatctgggtgtgtgtgccagccacccagcccaacttcttggctctctgagtgccactatcaggaaaggggccagggctgcctcagtggctgggaggcctgcttggacttgggggttacctagggccttagccctcttggctggcttcccaggagctcggtcccacaggacttggggacagggtgggtgcagcacgctcccctcaccagcccccattggcttcctgctggacccaactcacctccctcctcatctccccacagcccgatctgctcaacttcaagaagggatggatgtcgatcttggacgagcctggagaggtaagaggactgaggccggaggggaggaagctggcttgtgctgctgctgggcccctgggcagcccaggagtgggggtggggctggggctggtgtgagaaccctgggggtggggctgggaggggtggaggctgcccattaggcttctgcctcctggagcagtctgcagtgtgtaaaagggatcacagcaaggggccgtctagcccctcacacccagtgccccatcccttgatctcatcaagagtctcttggccctgccacctcagtaggagcctgggtgggagtcaagggtcttgggtggaagggctcgtagaagctgtctggcccgagacacagattcctaaagcctggtctgaggggggtggggctcagggcgcaggtgctggggtttcacccacctggatccccactggttgagtcaaagcctcctctagtcctcagtggccacgtctgtgacatgggcataatggataatggtgattctttctagagtggataacaaggtcagagagatcaagcacgtacaggtgccacaaagctcctggcacttactgtgggctcagctaaagacccttcccttcctctggcatatgtgtccttggaaccagcagggacagtggctgtttcctcagctctgttctttcggctgccaggctggctccctgcccacactgcctgggcaggagcgtctccccacccctgccctgcatgcgcctgctgctctggtctgcgtgcagcctgcatgccggagagggctttgagccagaggggatttcattgtgtttccggcccacatgttttattccctccagcccacagccttccctacccgctgcctgcccgctgtccctggtggctgctctctaggctcacacaaagcccggcaccccgccagtgaccccttcctggcctccccacccagggtccccggagggcagagggattacaggccccacccagagctggccattagtcatcctctatcacagggttctggaatgtccgaactggaagggccctgggaattcagccagcccaaccccttggtgcacagacaggagacgggcccatgagggtgttggtctcttccaggcctaggagcacctggggcagacccaggctcagaactcagcgcacctgaggcccatggagctccacccagcttccatctcagacagtcataggctaggcctggaagagctaaagaaacctcttggcatagaacccctgtcctactttacagagaggcaattgaggtctgcagcagcaactccgtttacttagtgagaggaaaatgcttctaagaggcctggcctcccagaacaaacccagcaacctggttggtgtccatccctatgccaagggccatgacagccatccacacaagagaggatgggcgccgctcgcctcaccagaaggtctaggcacttctttttttgttttttatttttgtttttttttttctgaggcagagtttcactcttgttgcccaggctggagtgcagtggcgcaacctcggctcactgtgtcttccgcctcccgggttcaagcgattctcctgcctcagcctcccgagtagccgggattacaggcatgcgccaccatgcccatctaatttttttttgtatttttagtagagacagggtttctccatgttggtcaggctggtctcgaactcctgacctcagatgatccacccttctcagcctcccaaagtgctgggattataggcgcgag

SEQ ID NO: 70128 - DNA, 695 bp, Homo sapiens
caagccactgcactccagcagtctggcaatagagcccgactttgtctcagattaaaaaaaaaaaagaagaagaagaagggcgagaccgtttattgttcatcttctgcccgtggcctccctgcctgcactgactcgtggaatcctcacagcggcctctacccctagggtggacttcagcagttttactgacgggaaaactgaggctcaaagatgtttcctctgtcacctccatgatgtgtaaacatctgtgaccacagtttccttttcctatccctgtctagccttctctgggccaaggctctcccaggtcattgacctggccatccaggaaacagcccagcgtgtcccctggctacatctcactccagggctgcttgcccttctcaaaccctgaggcattcctaagccttccagggacgctgggcttgtatccgtgtggagctggaagcctgcgggctcctcactgccttccaccagccctgccccagcttccaggtcccactgaccacccttctccctcgtaggttcaggctcttcgggcccagctggaggcgtggcgtctccaaggggaggctcctcagagtgcactgagatcccaggaggatggccacatccccccgggctacatctcacaggtaaggccggggggctgtttttcagggggagggggcagatttctgcttgccgtgttatca

SEQ ID NO: 70129 - DNA, 6239 bp, Homo sapiens
tcctgtctgtaacgtggaggtgtcacgtgccaagggctcaggcacacgcgcgcgcacgcacaaacacacccattagtaaggacacgacccctggcattctaatgcgatttatacttttccatgaaggaattcatttccccctctcactaaccccagagacaggtagagccgacaggtggaagaactgaggcccgagagagacagcgggggaccctccccgcgccacggcacagcagctgtccgaccccctcctcacgcccggggggcgcgacggctgccgagggtcgcgggcagggggcgcggcgccggggactacatttcccaggagcagttgccgcggttccgccgttcctggggtttcaagagcctcgcgttaaagggggcgggggaggttgcgcagtccgccagctggaagatggctctgcgcccggtggggacccgagagccgcctgcctgggtgcccaggcggggtccggctgcagtgaagaagccccccagctctgcagtgtccctgaggggaggcgaggcgaggcgaggcgaggcgaggccaagccaattggaggccgtctttcctcgtcttgcccgcctcggcttcggcctctgcgcccaagccccagggaaccccctcccttcccctccaactccccggaacaggggaaggggcggtgaacctcgccgcctggcgggagaaggggtgtccactagctggaagcccctgcaacccgaggcaacccctttccccaattctggcttcagttccgggaatttacaggtcgctgggatgggcggggagaagggacaggagagatacaaaatgaaatgaacgcccaggtgtcagggagctgagccttacagtaccccgcccccaatccatccttctaagtcccgggcctccgcggtaaaataggggtgatggggatagtgatcaaaggcaggaggcgcaaaggatccagaaaccggtggggagcactgtgcaaactgtaaagcgctgtgcaaataaaattattgatcgtcgtgtcattggattcatccagtctttaagacatgcacggatctggggcgggggatggggtgacatggttctgggctctcagggtggaacatctcggatacggggagggggggctatttgggtgcgtattaacccaaccaggtcttaatgggaacccgagttgtctttgaaaataaccaaaacaaagccaccagaatgttgtgttttcaaatgacgaaacttaagagaaattgacaccatcaaaagacgaaccttgaccttttgaactaacctgaccccccattgcttcccttccccgcctgtgccacggagataagcccagagagaaggcatctgacaccgagtcttgcgctccccctcccccttcctcccctaatcatttggattaatccatcccttggcgtgcgggggaaacccattaatttgtcctggcttcagagactcccaggtccagtaggagccctcccacacccacgcagctacgatcccgtccccaacatcaaaaccctcgaacccctcccctttacccctccccagtagcccactgtgtctgcaaacagctcttggaccataccgggatgcgttcatcattttgaccagcaacaaactcccactcccagggtattgtttaagtgaacagtgaccggcctctatgcttagggaataaaagcggggttgtgggagaggggcccagggagcaaacgtcgcagaatctcagcccagggccgctgccaagcggacccggcacgtgagtaggaggtcggccgcagacaaggggtcctagggtctctgaggtctctcctgctggcctctgggcccctaaagcccctcgagcttcagaactccctacagacagtggcgccccgtgtccgcctcgtctacacctgccaagcagcacgggaaaatctgtgtgcattttaacaaagacatcgcatcttcccagcaaaatggcggtggtcgcggccacggctctctaaacaactccacactttccgaggacaggtcacaacccaagggacataaccccctcctcgacctctaccctagcgccccgctttcccaagtccccaaagcactcagggcctctcctcattacaggggccccccggaccgtccctggttagagcttctggggcagcttctccattgtggaccgccctcccccgcccccacattgccttcaaggagccttgggacggggactgaacccccaggctgggcctcacggatggggggcagcgagttctgtctctgacaccccaaaacttccaggctaagagaagcacacaaatgaattcccgattagggtatatgggagatgtaggggtctttgaggagaagaggccacccgggaggccctcctcatctctcagagggtccgggcagcactgggggttcggcctcaggagggaacctcaaggcagaggtcggggggcgcgctgggggagagacggcagaggagggggaagggacaaagtttgaaagtacccttccaactctttcagggaaagtttccttgggggccccatggacagagggggtagaggtgtggagggaccggtggcggggtgacccccgagaggtgaccggaccccgggggagcgacccctcccccctgtcccggctcggcccggctgggagtcgcccagctcggggccgcgtgtgttagttggggccgctttccggcagctccaccgggctaggggaccccgcagcgggccgggagcagagcccccggtagcctcaggggagagctttgctacggggggtttcccgcaccgaggctccctagccccgcagagccagccccccgcaaaggggaaatgtgccggcacaccagcggtcctcggcgccgtttggggtgcgtggcgggcgcggggggcggcggccgggccagcgggccgcccggcggggaagcccagggagccaggcagcggcccagggcggcggcggggagcaggaaggcccgggccggggggaaaggtcggatttgctcggcggaagaaacacagatggcggcggcgcagcgccattccgggccgggagcaggcagccagcagccctgtcctcaccgcggtccgcccgccgccgctaaatacccggatgcgccgcccaagcgccagacgcggagctgggaaaagggaggcagaggaggcggaggcagaggcagaggcagaggcagagcccgagcccggtgccgagaccaagcgacagaccggcggggctgggcctcgcaaagccggctcggcgagctctcccgacacccgagccggggaggaaaagcagcgactcctcgctcgcatccccgggagccgcactccagactggcccggtagtcaggggctcaggagcagatcccgaggcaggctttgctcagcctccgacgagggctggccctttggaaggcgccttcaacagccggaccagacaggccaccatgaccgagaattccacgtccgcccctgcggccaagcccaagcgggccaaggcctccaagaagtccacagaccaccccaagtattcagacatgatcgtggctgccatccaggccgagaagaaccgcgctggctcctcgcgccagtccattcagaagtatatcaagagccactacaaggtgggtgagaacgctgactcgcagatcaagttgtccatcaagcgcctggtcaccaccggtgtcctcaagcagaccaaaggggtgggggcctcggggtccttccggctagccaagagcgacgaacccaagaagtcagtggccttcaagaagaccaagaaggaaatcaagaaggtagccacgccaaagaaggcatccaagcccaagaaggctgcctccaaagccccaaccaagaaacccaaagccaccccggtcaagaaggccaagaagaagctggctgccacgcccaagaaagccaaaaaacccaagactgtcaaagccaagccggtcaaggcatccaagcccaaaaaggccaaaccagtgaaacccaaagcaaagtccagtgccaagagggccggcaagaagaagtgacaatgaagtcttttcttgcggacactccctcctgtctcctattttctgtaaataattttctccttttttctctcttgatgctcaccaccaccttttgcccccttctgttctgactttataagagacaggatttggattcttcagaaattacagaataattcatttttccttaaccagttgtgcaaggacagcaacaaccaatctaatgatgagaatgtacttatattttgttttgctattaacctacttacggggttagggatttgcggggggggcttgtgtgttttgttggcttgtttgccatgaaggtagatgtgggtggggagaagacacaaggcagtttgttctggctagatgagagggaacccaggaattgtgaggttagcaggaatatctttagggtgagtgagttttctttgagttgggcacccgttgtgagagtttcagaacctttggccagcaggagagaggtggtagggagcagccagccggcaaaggaaggagggggaaaaaaaccgccaccgggctgacttccacctcccagtggtgagcagtgggggcccaaacccagtttccttctcatttttgttagtttgcgctttcggcctccctattttcttagggaaggggagtggggtccaagtgacagctggatgggagaagccatagtttctcccagtcagctaggatgtagccattgggggatctttgtggcttcagcaaattctcttgttaaaccggagtgaaaacttcaggggaagggtggggagtcagccaagtgcctcagtgtgccctgttgaaacttaggtttttccacgcaatcgatggattgtgtcctaggaagacttttcttttcctctggatttttgttcctcctgtacaagaggtgtctttgcttggtttggtggggctgcggccacttaaaacctcccgatctctttttgagtcctttattataagtagttgtagctgcgggagggggagggggagtgggcgggcagtggatagtaagacttactgcagtcgatttgggatttgctaagtagttttacagagctagatctgtgtgcatgtgtgtgtttgtgtatatatacatatctagggctagtacttagtttcacacccgggagctgggagaaaaaacctgtacagttgtctttctcttatttttaataaaatagaaaaatcgcgcacttgcgcgtcccccccccacccccttttttaaacaagtgttacttgtgccgggaaaattttgctgtctttgtaattttaaaactttaaaataaattggaaaagggagaaactgagcggtgtatttttcctcactttgaagactggagaatgaatgcggagcggttaggcgggcaggcagtggggacatctggggcgtttgcacctgagaatggcgggggagggttcaggagctggacagaagccaggaatccttagtcccggaggctgcggaacgtgccttagccggcttctaggcttctgcctttggggtccagagggtaccccatttccggccgagaggtgagtacgtgggaatgcggtggggagtctggtgggcttggccctgacgcgacttcctccgcccccttccctcccctctgccatccggacttcggcagtctcaacttacaagtcaagcctctcggtccctggcggatcccgccaggccccgcccacccgtcctaggcccgcctccccgcctttttaagcgagcccccctagctccgattggctgctggagcccggcccccggccacgcgaccaggctgcgtccgcgatgcgcacggctcccaggcaggcaggcgcgctcgggcgaggtaggagcgatgtggcctgggaacgcctggcgcgccgcactcttctgggtgccccgcggccgccgcgcacagtcagcgctggcccagctgcgtggcattctggagggggagctggaaggcatccgcggagctggcacttggaagagtgagcgggtcatcacgtcccgtcaggggccgcacatccgcgtggacggcgtctccggaggtaacgctccgttccgggagtcgttccaagacctttcccgagcttgcgctggaatggaggtcctggaggtgggggtgggcggctcctacactcttagctactgttccccttcgcatctctcagggcgactttatggcttcctaatattgactcttgcctggttaaaccctt

SEQ ID NO: 70130 - DNA, 597 bp, Homo sapiens
acgctgcggcctcttaggccagctgtctgtctaagcttgaacaccccaagccatgaggcagtcccgaatctgagacctggggcagttcccttgccctctgtgttctgcccccaagcctgttggttctggcacgcccttgctttctaccctcccaggcatctttgtcatcgggttcagctaccccgtggtccccaagggcaaggcccggatccgggtacagatctcagcagtgcatagcgaggaagacattgaccgctgcgtggaggccttcgtggaagtggggcgactgcacggggcactgccctgagctctgggtaaggacgagaagagccaaggtccgcctactgccacagggtcaaaggaggttttcgatcagcccagaccagaggctctgagccctgaaccaaagtcccagagctgggctgggacgtgacctgtgctgagggctgtgagaatgtgaaacaacagtgtgaaaattggctgtgacactctggtctgctttattgtctctgggcaggcccagtcctgtggccggttgaagaatcaggcaggagccagggctctgaggggaggcgcctgaggactgcagatctccac

SEQ ID NO: 70131 - DNA, 797 bp, Homo sapiens
tcaaaaaaaaaaaaaaaaaaaagctggcacccaggcctttgggagataggcccagtccaccgtttgtctcgggtagtttctgtgctgctgtggagggctgctgagaactagccccacaggccttttaccctgccactgcccgctactctgcagcccctgagtctagtcttagagtctagcttcttccttctccccactggaagatgtcctgtagctgcccagataggaggaggctgggtgtccatgtttggaaggagaggcagaggattcaggcccaaaagaaaagaatgaggatcacccctggggaagctccagacagtctggaaccctgtgttcgcgcccactctctccctgccttactctggctttcggcaagctccagtccctgtgtgtgcctcagtcctcctgccactatgccttgaggtctgaggtccttccatctcgctcattccaaggcctacgatgatcagccaccagggggtgctgcgagcacgggccgcggccgccggctcgccccgcccctccagactgggggccttgggccgcggctgttcaggctgcccagcagtcaaggccaggagaggcgatttgctgctgccaaggccccatcctcccttgtgccccacaacggctcgccgctttcctgttggaggggcctgcgggaggagggcggtctctccctggcgaccttgtggaccccttgtggggtggggagtggggtccccgcagctccaccctcagcgtggtgtgaccttgggaagctcttagtttgcttgggacagaggacgaaaaggccc

SEQ ID NO: 70132 - DNA, 726 bp, Homo sapiens
ctgggagtggctctgaggccgtggagagagagcatctctgccccacggcatctgcgggtgagggcaaggtcctcaccagacaagtgcagctccaagtcccagatgttgggctttttcttggtactgagacagcagtggggcagggtggggcagtggcaggaaggcagggagcctctcttgctacctcttctccatgctctgcatctgcagactgagggaggtgaagctggccaggaggtcagtcacttcatccacctgcaggacggaacagaggctctgttatgggacacggggtgtgccagggctcctgggtctcttccacaatcccacaggcacagaacacaggcacggtctctcctcccagggcgtgtggtggcttctgactacgcagcagttgaccaagggtcaatctttgacaccaggtggcctagcgctgtcctagagggcagggccatgaacacacactagccactggcaacttcaaaggaagtgaacggaggctttgaagcctgcaaccccacaatcataggctctttcccccactttttttgtttgagacagggccttgctctggtttttttttttgttgtttttataatttttgcctttttccacatgttctgagaggaccttgctttgtcactcaggctggagttcagtggcaatcacagctcactgcagcctcgaactcctagcctcaagtgatcctcccacttcagcctccca

SEQ ID NO: 70133 - DNA, 1592 bp, Homo sapiens
ttggctgcaggctctggcctcccctctccatgataataaaagtgttccccagtacctcattttattattcaccaataagcgttccgagtcatgggaagtttccattcagaaattacccagtgagagaagactggggtgactggctcagagcaggaagactttctaaaaaaaccatcatcaccatcgttactgaaaggagactcaagggtcagtgtggccctcagcgcagacgtcgggggaccccggctgagggtcgggggcgaccaaagcgcggccactggtcctctgaggccccgcccctcgcccgggctgccccgccccgggcccccgcgccgctcgcgccgctcaccgtgcacctccttgcccgtgggcccgagccgccggtggggcctggcagcgcgcctcagccggccagcgggtatcttgcagcgcagctcgtcgcgcggctccgcatcctgctgccacaggacgtgcaagtagcgcagcggcgactgggccccgccggacgcccggcccgagaggcccgcgccgccgccgcccagcgcagacccgaagtcagcgaaggagaagaggccctcagcgtcagtcagcggctccggcgccaccgcgcactcgccctccgagctcgagtggcctgagcgcggctcgtcgtccgcgtccccggcggcggctgccatggcaacggctccgcgcgggcctggccgcctgagcctcgttcccgaccgaccaacggacctacttccctccgccctgagtcgtgctgtcagcgagctggcgggcgggcagggcccgcaaccacggcaaccgagcgggggcgggctcaggccgagacagagcggcgaaccaatgactacccttccagcttaaaccggtcccaaaaccaatcggaaagggagggcacagtacaagcaggataattggacagggtttccggcaacgtgactgacagacattgtaaccaattacaaacttgaagtgaccttggctttcgctgtacgtcgctaccggagccagtaaaacagcatttcagacgctttttttttgcgacggagtctcgctctgccgccaggctcgcgatctcggctcactgcaacctccgcctccttgaagcaattctcctgcctcagcctcccgagtagctgggactacaggcgcgcgccaccacgcccagctaatttttgtatttttagtagagacggggtttcaccatgttggccaggatggtctcgatctcttgatctcgagatgtgccggcctcggcctcccaaagtgctgggattacaggcgtgagccaccgcgcccggcctttttttttctttttcctctccatttcccagtctaatgagaaaacaagcagataccttagcaaatcagattaagatgatttgcaggcactcacaaaggaaaatgaagaagccacgccatccatgtagatatagatgttgtaaatcaatgaacgcaaaaaaaaaaaaaaaaaagaacttcccacaaatgcataatgtacgtgggaaagggaaaatgtgttgaaatttggagataccactacaaactgtgagtaatagtgtctaaatgcaatggatttcctttagtca

SEQ ID NO: 70134 - DNA, 1948 bp, Homo sapiens
tgtcgcccaggctggagtgcagtggcgcgatctcggctcactacagcctctgcctctcaggttccaccgattctcctgcttcagcctcctgagtagctgggattacaggcggacgctaccactcccggctaatttttgtatttttaatagagacggggtttcgccatttcggccaggctggtctcgaactcctgatctcagatcatccacccgcctcggcctcccaaagtgtagggattacaggcgtgagccatcgcgcccggccaaatctcaatttttatccccagtaagtttagtcttgtgaagtccgaacgtttgaataatttactcgctgcaggcaaaccgcctacaactaaatccatcaggcccccgtatccgaatcttccttcacgcgagaagccggccatcttttgtgtagcattctttctggttcctctaactttgcctctcctttacgccaaatacgtgtccttatatctgaatctacaccactattatagattcaccttctttgagaagtccctatttgaagagaggaaaattcaggctacttgtaaccctcttattctttttagacggagttttccctcttgttgcccaggctagagtgcaatggcgcgatctcggctcaccgcaacctccgcctcccgggttcaagcgactctcctgcctcagcctcccgagtagctggaattacaggcatgcgccaccactcccggctaattttgtatttttagtagagacggggtttctccatattggtcaggctggtctcaaacccccggcctcagcctcaggtgatccgcccgcctcggcctcccaaactggtggggttacaggtgtgagccacggaacgcggctcctcttccttctggatatggctgtctcagatggccagaggcctcggaaaggcttccggtttcccggcaggcccgagtggggctgaacttccggcctcaggacgcaggcgcgggccgctcatttcgctctttccggcggtgctcgcaagcgaggcagccatgtcttatcccgctgatgattatgagtctgaggtaaggtggccgtaagggcgcggtgggctccacgacggggtgatctctgggaccactggatgtgggtcccggcgcgaggcagcttccgggtcgcggccagctccggccgacctcccgcccggccctcaggctgctcccacagttcccggtccctagacaaccctggctctgcccgcccacttcgcgtgttcgattggcttgtccttcccctttctaagaccggagactaaggcctgttagacgtttctgtgtttctgcacctgagtttttttggtctaggctccgtctggtcaaatctcgctgattcccacagcctcttgtcctttgctccacctcattgcacccgtaatgttgtattgtcattgtctgtttactgtcccttttctctaaggcgtgtgagttcctcaaaggcaggcacagtgtcttattcgcctctgtatccttagctctctgcttggcatctagactctaggatgagcgttttgaattcacgacttggcggctgtccttgactgtgtctctttccttctaggcggcttatgacccctacgcttatcccagcgactatgatatgcacacaggtgagaccacgggttaggctggctgagtactcgtagggatcagttcctttggaatgtcttagaaccagctctgacaggcatcaaaaattgctctttgatggtccaggtttggagtcagtcattagctgccagtgcgaggggttttataaagcctaataaaccaggctttttatcatagtccacctcagtcttggaagagaaggattacttacctggctatggttttcttgtgtaaactattagccaaataagaaaagcttttttgtttttgtttttgtttttgtttttgagatggagtttccctctgtcccccag

SEQ ID NO: 70135 - DNA, 972 bp, Homo sapiens
gccaggcgtggtggtgcatgcctatagtccttgccacttgggaatctaagtcgggaggattgcttgagccgagttcaaagttacagtgagctatgatcacaccactgtactccagcctgagcgacagagcaagaccctgtccctaaacaatacataaatccgagcatagtgaactcgggtatgatataggtgtttgggatgactcatatccatcccgggtgtattgtatcacctggggataagttgtgccctgtctaacccctgctctatttagaggaaagagcagctcactcccagaatttcaacacaagcctcactttctgtttctaacaggaagagctgcctggctcacaacaccatatacatatgacctcaggtagctgggagacaaacaggcctcttccggtgtctgacagccccttccttgccactcaggcctcagaggagaggctaccttcctgtgtcaggaaggctcagaaactgtttcccactctgcctgcctttgcctgcagagcaggccagattgatactgagggggtagtagggagggctctagctcccccaccccaaataatctggcaccccctaaacctacagccaaatcataagcagtgggcttaacctacagccaaatcataaacaatgggcttgctatgcagaccaaattctaagtcaagtaaaataaaagtcaggactcagcctagctgtttgttgttgtcattgttgttgttgttttgcccaggctggagtgaagtggtgcaatctcggctcactgcaacctctgttccctagattcaagcaattcagcctcccgaatagctagctaggattataggctctagtctccttccctttcttcctgccaaatttctgcccctgagctcctcctatagagtgacaggagcccaactattagggccttgaatactacattagcacccaaacatcaatcctgctggcctgctggaaaaa

SEQ ID NO: 70136 - DNA, 3426 bp, Homo sapiens
tgtgtcccccaggttggagtacagtggcgtgatcttggctcactgcaacctccgcctcccaggttcaagcgattgtcctgcctcagcctctcgagtagctgggactataggcacgtgccaccacgcctggctaatttttttatttttagtagacacgggctttcaccatcttagccaggctggtcttgaactcctgacctcatgatccgcccaccttggcctcccaaagtgctgggattacagtgagccaccgcgcctggcccaattttttgtatttttagtacagacggggtttcactatgttggccaggctgttctcaagctcttgacctcaggtgatccacctgcctcggcctcccaaaatgctgggattacaggtatgagccatggtgcccaaccccgccccccttaggttttaatgagagtcctgggtggtctttgaaggcctaggtggatgctggtgtcaggatcctgaacccaagtccctgatttcataaaaagcatccggaatcctgctttcctgccactgttatcccacaggggacagggcaggagttggcagctcagggctggtgagaagtccagagggctagccaggcactctggccatgctcttcctaggtggcctgagagtccatatactgagccaagatggcggccttccagttgcaggagtgttaggccagcccagattggcaagctgggttctccaggccctgggccagtattctggactgggactcagtggactttgaagaggtagaattccctaagtcggcctctctccttgataatttacccagaatggcccagatgacaatctgggtacaaaatatttcagtccatttcatcatgtttaccaagtaccaggagtcaatagaatttatgagtgataactaaagggtaaggcactttacatcttaatcctctcagccaccttgtaaagcaggtattatctccatttttaagtcgtggaaactgaggtccagggaggcacaagatcacatgactaagggagtggggaaagccaggattggagattgggttaatagggctccaaaatgcctgatctttccactcccctgagtgctcaggggtgatgaagatgactaagaccctgttccttcccttgggagggagcgaaatacccactccagctaactattgcatgggtcagggtgacatcaccacctctgcagcagatggaggctgattcatctgtgggagagtcaggaggggcctctgcggaagggtcggctggctggaagggttggctggctggaagggtcggttggctggcgggggttttgaagacggcaaagatagagaatgagccttggggaggttccagggccagatacaaactgcctgtatgcctcccaggcaggggcctccttggcctaggtccttcccataggaactcaaaccaccaccacactaaccatggctgaggggacccggcaggccgcagtggggagggacgagatccctgagcttacacaggggctgaggggagctcagtgaatcacctaggggacacctggaccaaaggtggcggaggggcgcatgggtctccctgccaagctatgggggaggggatggtggacatgacaacttccagctcagcggtgctttagggtggggagccgggatgagggaagctggtggctatccgggggggggtgctctgaggtctgcaggggaactgcctccccaaagtttcaagctaggggtggaaggggggatttgcggtcattaggagcgggaaggaggccggatgggagcacgaggtgtcccgcctccaaagggtggagggctcccggtgggtggcgcggcggcggccgcggcggtgaagtcatcgtggggagtggtccgcttgcggcgggtgcgggggcttcgcgggcacccagtggagcagcgggagcccggcgccgtcgaggggcgggcgatggggcgccggcccgtcttggtaggggtgggctccgcactggaggcggagctgctgctgggtggggcgcgcctccggcgcggacggaggcggcgggacgcccgctcccacgaccggcccacaatgaggcgagcgggcagcgcggagtaggcggcggccggccgggccgggccacgcggcggcgctgctcgggcaggttagggcagggccgcggggcgcccgagcgaggacaccgcggccccgcctccgcccctcccctcgcctgccggtcggcgcccgagctcggagccgcagccgcagccggaaaccgggcccgcgcggcggccgccgtcccggccaagccggggccccgaagccagagccggagccgggcgggccgcggggtcatggctgggccgcggggcgcgctgctggcctggtgccgccgccagtgcgagggctaccgcggcgtggagatccgcgacctgagcagctccttccgggacggcctggccttctgcgccatcctgcaccggcaccggcccgacctgctgtgagtgcggggccccgggcgagcgggcggcgcggggcgggctggggccgcgaccgccgccccccctcagtaacacgaagcccgggcggtgacaggcgccgcccccggacacggagacgccgacccccccgacggccccggacgccgggcgggtccctgagaccccggcccagggcgcccctcccccgcccggccgccctgaccccgcccgtgggatcccgaactctcccccgaggctggtccctccgcggggacactggccccgcccacaaagcgctgatttccgccgaggatcgctgaacccctaagcccttgacctctttgaaggggtgttgagccctctttgggggccctgggcctctcctaccctaaactcttctccacgggctcgccgggcctcccctctcccccgaggcttcccactcggggtggccccttgctccgggtgtgcaggtgaacccccacttctctgacccccaaataggagcttgtctccggacagtagcacagttcccggcacagaggagacctcggctaacaggtgttggatgaatggatgtacagaccctgtgctttccccacgccccccaacttaggacgcagccctgcctcccgggtgtgtgctcgatggccctgcagccctcctcagtggggcacgcaggtggggcgcgcaagaggagtcacaggccggcaatgttgggaagactcctaggatccgattgatagacaccaaccgggtgctgcaggttgtgaaatggccccttcctgcccagagctgcccaatgaggttctcatgggaaaatgcattcagactccccggaacagttgacttggagcctctgtctttgctctctctgccttgagccctggaacctctcctcctttcgtcccttcattcctaaaacactgggtgagtttatctggtgccattccttgcacttcaggt

SEQ ID NO: 70137 - DNA, 1013 bp, Homo sapiens
gcctgttttgtgcgtgggtcagactgttccttcttctgccactaacttgctgtgtgaccttgggcaggattcttagcctcactgagcctcagtggcttcaggtgtaagatgggaatgaaggtccccacgtcctcgggtgttcttgggaccaggagacagtggacgtggactctgtaccctctgaagggctgatggctgatggttaccatgtggccgagttggggtttggtgaggagggctcctcacacgccctgtgaccgtggaatgcagtgaaccgcagctgcaggcagagaccccaggactatggagattccagagttgggagccaaagcttttgaccactttcttatggctcaggcatggtgccagccctgggcaagggccatcttgacagatgggaagtggagggccagagaggtcaagggacttggctgttggtgacggggctgggcttccatccatgtctctgatctggggctgtccctgcacacacagcccctccagactgtggggatggtggcaggggaactgtctactgactggggaatttgggaggctggagtgtcccaggggaagccacagaatgtcccaggcttccactgccttgtgtgagtcactcccaactctgcaggaggctggggcgtggccaccactcagagccacagcggcgccctgtggccagagcgggcacggctcctctgcctccctggctagcccggccccagggcttactgtggcttttccagcccccgtgtggtggctgtgcgtcccgggcttgtcagcctgtcccggatgttgcttttggaaggtgaagctggtgtatgaggctccgagtacagtacaccatgagggccattgcttgggggcatcaggctgccaggttcaaataccagctccaccttcactgtgtgacactggtcaaagatttcatgtccctgagtctcagtttccccacgtgtagactggggacataacttacccaggccccagatatggaaaatggcaaagtggga

SEQ ID NO: 70138 - DNA, 1223 bp, Homo sapiens
ccggaggcggtgaccactgctttacagccgcatccgcaccggtgccacgcagaaatactgcgcgatctgggctgctggagctggcagctagcgcctctcgctactatagaaacgcgcacacaccagtcagcgcatgcgcactttccccgctctgtcctgcctcccggaagtgatttcctctgggttacggcgcaggcgcaagataagctaggagccgcgcgagtcgtagtgtcgctgtttgcgggtctccgcgcgggaccggggcgcagcggggtcgctgaggcgagggtgtcatgtcagacaacgaggacaagtgagtgcgggagcggagtggcctttgcggcaaccttggaaggggcggatgaggcaaggcttgggtcggctgaggagcctggcgtctaggggcaatgtctgaggggactggggtcctgagggggccggcggagccgaggaagggaagggcgggcgacccaggagcacagccccggctggaggcacaggagggcccaggctcgagggtccagaggggatccgtagaaaaggtgtccttcagcaaatgttccagcgagccgggctctgtatcatgcagtgggaatattgaggtgaatgaacaatcgtccctgcctctccacgtgctcactttctagaaaaggggtcacaggcccataagtaagcaagcaagcaggtaacggtggtcgcgtgagcttccccagttctagacgtatgtagtataggagtactccagaggagggtctggggcagctccaccgggtggcattaaataaaagtctgggacggtcctttgcagtaatttttttttttttttgaaacagagtcttgctctgtcgcccaggctggagtgcagtggcgcgatctcggctcactgcagcctccacctccggggttcaagggattctcctgcctcagcctcccgactagctgggattatgggcgtgcaccaccacgccttgctaattgcttgtagttttagtagagacgggtttcaccatgttggccagactggcctcgaactcctgagcttgtgatccacccgcctcggcctcccaaagtgctgggatcacaggcgtgagccaccgtgcccggcctgcttgtagtaatctagatgagagaagtcagtagcttatagtagggtggtaggagtagaggtggtgagaactggttttgaattctggatatattactattttaaagatagagcccaa

SEQ ID NO: 70139 - DNA, 1556 bp, Homo sapiens
ggcattgcctttgatccttgccatggttctggccccatcctcccattgggattgggtcctcagcaagtagtgccagttttcctgactgccacacctcaggctggcccctgtgcacacagcttgagtgatggccaagaataagtcctcctgaagggagtccaagcccagggttctgggctgggggaacctggggacagggacaatggaggagccaatcttaaacccttggcaatgggagatggagggaaaatgaggtccgtccttgctttgactctcgttgggctcgtactgtggtcttctcatggtccccagagtctgccctatctgtatgtctctcctggttgtctgtttctcacttgctctttgtcccctggcactaaagatactggcctgggccaagccccacccagatctggatggaccttgggtggaggagctagctgtgacctctgctcttgggcagaactgggctgtctgggtccacacagcgggctggtcgctgagccctgggcctgccctgggtgagcagggcactgagggctgagaaggggcaggggaaggggcaccaggtcttcagcaaacacatggcaagaacaggccagggggcgggatgtgaatcttttggtctcttggagatcctcctgcaccttctaccactctaagcctctagacccaatctctacccaactgtggctggcaagggggagggcagcggaagagagccgggctcctctgacaaagccctaattttctggaacccagatgctcctcactcttgttctcatcttcttgcttccccccaacctcctgaccactcctcaaagtgtaggtgatccaccactgtcaccagggtcaggggaagtcctctggacagagagtatgggagtcctgggttctggccctggctctgctaccaacttctatgtgacctttgtgattcctttgcctttctgggcctgtctcttggtcagtctagcgagaatcaggtgactgctaccggctcacatctcctggagtccctggtctctttcagagctgctctggcactcccgggtgggagtgggggactgtcttgttccacacatccccaggaggcctggctgaaccccagacctgagtcgagggtgggataattgctccctgcgggggatgtttttcctagaggtgtgggctggtcccagggaacctgggactctgagggcccctgggcaggaaggaggccaaggtttccttctggccagagtgctcagctccagctctggggcagtggggaagaggttgctcaacgttggggtggggccctggcagggaagatggcgccgaactgggagagggaggaaagagatcagcttggtgactctggggcagggcaggagggggagccccttactgtgtgtcctctccctaggaggatgaagaagcccccaactcaaaggagggtggcgtcagaaagtcccagggaagagccctaggataggatgaggtcccgcagcagcagatttgtcccgcagttcttcatccctcactcttccaaagactctcatctgaattccgtt

SEQ ID NO: 70140 - DNA, 1571 bp, Homo sapiens
gggctgctcctcaggactaaggaaggaggagggggtgtgagaaacctttcaccatataccatagaaagcatttacctcaatggccttggtttacatatggggaaactgaggcacataaagggaagggagcatgtccagtctgtccttaatagcaagacccactgaatacacctctcctggctctctgtttagtgtttggacgttcaaagatccctagactaggcggcgggagtttcagggccacgatccagatcttacaccaactgtgtgtggccccgcacaaaatcactccccgctctttggcacttaagttggcgaaactgggatgggctgggacctcaaagggccattctagtaggggagtcacaggcccaggtggtgaaggggtgaaagggcatgatgtcttggggtttatagtccactgagcctcgccggaggtaaccccggctcagggatgctttcgttgccatggcaaccgccgggccggcgcgggcccctgagtgcagctgaggaagctgggacaaaccctgcccttcccaagatggcggcggcggcagggcaaagggcggggttagacgctgtcagcctgtccagaccgttcctctgttttcgcttgttcctactaacagcgagcttccgccaatacttgttctcgttcttggttccgagcgtcccgggagccgggaagggaaggattgtctgcagggattggagcaaatatccagtggggggaaagccgggacttccgcgtcttgccggaagtgacgtgacaatcgcggccaccgccaggtggaacggcaggtgggttcaggtaccagcctggccgggacccggctgtgggaccaacgcttccggtgagcgacagaggcagctccccagggcctggagacccgtggggcggactctgggatctgagcctatcgccctggcctggagcccccctttgtacctagtaagaatcacctacccagccccccacccggagactgtcccatcccactccagagggaagaggagggcactgctgtcccgtatgaggtggtggagggaggggtggcgttggcatttaggcacttgggttccttaaatcctatgctcctttctctcccggatccagttccccattcccctaccgagctgggcagttagccagcccactccaactctcggaaccatgtttgcagacttggattatgacatcgaagaggataaactgtgagtattttattcccccaagttccagcagtataggagccccaagttcctcatttccctggacttcccagtcccacagacccttgcttctcagcggtggatcagttgttgtactgaagcagcaatggaccctgctctcccaggagctcactatttgtagggggctgtggacagttaaagggataatcacagctcagtgccataagggcactattagcatgacttggtgacaagaagagcaaagcagatggagcagtgcttctgctgggatggtcaaggaaagcttcatggaggacgtagcaattgaaccaggttttgaaggttgaataggaatattgtagacacccttccttccc

SEQ ID NO: 70141 - DNA, 890 bp, Homo sapiens
tccatgtggctgctccctgggaggctgcagtgaggagggctgcagtgaaaggacctttctcttccttgggcctccattcactctggcatctcaggcaatgactagctctttgagactcagtttcttcctctataaaatggaggcagaaatgccaccagcctcctagggctgctagaggcttgaacgactattgcagggaaccgtgccccacagagccgggtgctgggaagggcagccacggtcatcctccctgggaagggcatctggtaggctgggccctctccttggaacatagcccactttcctcgagtgacccctccaggccctggggcctgatactcaccaccacctccaggtcagagttcaagtgccgctgggtgtcagacatctgcaccaagatctcccctggaggcatggatgcagctgtggctttggtgtgtggcagcctgccccgcccacccaccaccctcttccgctgaaagccaacagagggcctgcccgagactggattttgggaccaaagtccgggaacttcccatatggttctctgggagccaggccatgtgtgtcccagcctgggagcagcccggcagggagtggtggcggggagcctgggccccagaacaagagtctggctctgggccctgggctgaaaggcctgtgtcagggactcgggacatcctggaagggcaagggtgcaaaaggagggcccaagaatggggtctgctgtggagggggagcctcacccagaatctgtgaggtggggctctgcagggcacgctccccaatcttctggatggcactgaagtagacctcggccgcctcggacagagctgtggaccagaagggacaggtctggtccagccctgcctctgccccacccttctgga

SEQ ID NO: 70142 - DNA, 2355 bp, Homo sapiens
cagaagattcaaggctgggggcaaggaggaccctaccccacctccaggcccagtgggagagggactgggagagaaaactctcaggaggctgcggggcaagcgggtccttcaaggagagccaggtgtgggttacagtgaggaggcaaaggggagattcagggagaaggctgaggctctggaggacacacgggggtgtgtctcttccctcccttctagaaccccaggctgaagccacctggcctccactcagaagcctctgctgtgtctctgctggggtgggaggggtctgtggctaagcctcaggggacctgcaaacctcttgaaagtggctgtgtgagcctgttctcattccccagggacctcagggggtcctggaccaaaaaaaatgccaaggaccctcacgctagagcagtacctgagtccccagtttcaaagcccagcacaggcccttcctgcccacaggctccccacagggcccctcctctgtcctctgggcctttcctagtaccttgtctctgtagggcctttccctccagctggtggagtcttctggaccccttaaggtctatctctaccccagccaccccagtggagcctttcccacgccctctggtcaacacacttggccttcagcaaccatggatacatctagccactcggcagatatttaccgtgcacccacggagagcgtggcacaccaccaggcatcaggaacgcagaggagacttggccccaggccctgtccctcaggagccctgcagtctggaggggaaacagatgtggaaacagacccacggcaacctaaggcaagaggggctgtgtcttggccacatggggggtgctgaggctctgagtgggaacaggacaggcccacagagcaggagccgtgtgtccagccaaggagttgggaaggagcattcttagcagaaggagaagcaagggcaaagaggccgtgtcggggacaaggcctgtgtagggaatacaaggccccactctaaagttatctcactgaaggctgggtacagagcctccttttctcgcagagacctgccgctttccactctgcttggtgaagatgggatgtgggaggactgaatggatggaggagctggccccagagtacgtggccaggacacagggcactccacttatctgaggtttctgataagcagttttatggcaaagtcccagtccagagagcctcaaaagtcagctcccggtagggaagcacagatcacacacttctatcatccttcccaggatgcctgggaggtacagccctgtttctgctgagataccagtgagaggctggttgatttcatcaaatgtcatctgttacaagtcaatgccagccgtaaatgattaatctgtaccaggaacagaagtatctatgctatcatagtgtacacaggcatattacaagtgacccctgggggctcacacggggagagccagggcccccgcaccataggtcaggcaggaagggccaggatcagcccaggcgggtggagctccactcagctcgccacactacaaagcagccctgatgtaagaaaggtaaacgagtgggttctggagccaggtgacagggtctgaataatcgctacgctgaccagctgtgtgatctcaaattctgcaagcctctgtttcctcatctgtaataggaggtcagtaatgaccccacctcgtgggactgtcgtgaggataacatgagttactacttagactagtgccaagcccaggcatgcaggacctgctgggaaactgcagatgctcctgctgctgtcgctgtctgtatcagcagggtccagtctctccgcccagcagcagtgctgtgggactctccggccttaggttatacaacccaagaattcagaagctcctaattccatcccccaggtccatccagaagctcagcctggcagctcactgcagcaacagcagcaaaagaacaacagaaactcctccacctggagcggaaggctagcagcccatgctcactctaacacgcgtcaagtactcaggacagtccagaggcctctagggcaacacaggaggaagatcgtttagaaggcagaaactcagccctggccagaggcaagtccagtgcaccaggcctgctctccacagaccgcagggtgttgagaggagctgggagaacactgcaatgaccacccccggccctggagaaccccagggctccagcagtgccctgatgaccctcctccacagcctcgaccccaccccaccccatcgcagccctcactccaggtcacagcctaggccttggcattactgcttctgggacccctgataacctcaaaccctgcatcccagtccccatcctccacctcc

SEQ ID NO: 70143 - DNA, 5100 bp, Homo sapiens
tcactcttgttgcccaagctggagtgcaatggcgtgatcttggctcactgcaacctctgcctcccgggttcaagcgattctcctgcctcagtctccagactagctgggattacaggcgcgcaccaccacactcggctaattttttgtatttttagtagaaacggggtttcaccatgttaaccaggctggtcttgaactcctgacctccggtgatccgcccacctccacctcccaaagtgctggggttacaggcatgagccactgcgcccggccgaattgccacatttaaccctccaaacacctgtaagaaaaggtccaggtctctccacattacacaggaaactggggcacaggttacacagtttgccaggatctgaacccaattaggtggaatccagagcatcaggctcttaatcctcaaactgccttcaggagaaagctgaaagaaggtggctgagcgaggcttgctcaacaggctcttagattccaaaagccaaggccctcgtctcaaaatgcactgctgctcacgtgagccagagcaaaacgtcctttcacaaaaggaaaaagcatctctttcattcactccgcttggctggaccacagctggaagcaaactgccccgaaactgtcactggagctcccaagcacatgagacaggggtgactttaagagatctttgggctggtggcacggtacagtgtggcccatgttatgactcactccacaaatatttactgagatggattgtggcaggcattgttctaaccgctgaggatacaatcgtaaacaaaacagactggtcaggcacggcagttcactcctgtaatcccagcactttaggaggccaaggaaggaggatcacttaagctcaggactttgagaccagcctgggtaatatagtgagacctcacctctacaaaaacttaacaattacccaggcatggtatctctcatgcctgtaagtcccagctactaaggtggctgaggtggggggattgcttaagtctagcaggtcgaggctgcagtgagctgtgattgtgccactgcaatccagcctgagcgacagtgagaccctgtcttaaaacaaaacaaggccgggcgcggtggctcacaccagtaatcccagaactttgggaggccgaggcgggtggatcacttgaggtcaagagttcaagaccggcctggccaacatagtgaaaccccatctctaccaaaaaatacaaaaattagctgggtgtggtggcgtgcacctgtaattccagcttcctgggagactgaggtgggagaatcactcaaacccaggaggcggaggctgcagtgagctgagatcgcaccactgcgctccagcctgggcaacagagtgagaccctgtctcaaaaccaaaacaaccaaccaaccaaaaaaaaccccacaaaatccctgacatcctggaacttatattttagacagagctactaataataaagaagataaacaggtaaatatttacaaaggttttagatgacaattaactactgaggagaaaaaccagagaatggggataggaagtgctgaggtggagagtgaaattttagattgggtgaggagagaagtcttcaccaagaaattgatcttaaataaatacctgatggagagagatgaaagtcatatgaatagctaggcaaagagagcgtgtgcaaaggccatggggctggaacatgtttagcgagttccaggaaaagcaaggaagccagtgacatcagagaggcaacagggggccaggcatgtgccatgagaggagaggccactgcaaagaaacaacattttaacaagatcactctggctgggtgtggggtaagaaacagagaggcatcatagataatctcacagctttgacctgagcaactgaatgaacaatactcctatgtcctaagatgagaaagagagtgggagggacatgttttggtgaagagtggggtcagggatggagggcagaactaacaggagctcaattctaaactcttaagtttgaggcctggcgcggtggctcacacctgtaatcccaccactttgggaggccaaggcaggtggatcacttgagatcaggagttcgagaccagcctggccaacacggtgaaaccccgcctctacaaaaatacaaaaattagttgggcatgatggcgcatgcttgtaatcccagctacttgggaggctgaggcaggagaatcaggaggtggaggttgcagtgagccgagatcgtgccattgcattccagcctgggtgacagagtgagactctgtctcaaaaaataaataaatcaataaataaatacttcaagtttgaaaagcctaagtttgaggtgctgagtaagcaactagatttgagtatgtcattccagggaaaggtctggactggactggggatataaatttgtgggctgacagaatagagacggcacttaaagaaataagactggatgagatcaccatccgaaaacgagaagaggcatttaagacatgaccctatcaaaatccactgtgaaagacacagaacatattctcccagggagccaccctctacaaagtgaagtttgtaacacactcttcactacggccccttactccttgcctacctacttcccccagcacacacacccaatagatgtctgcagacacacacacacacacacacacacacacacacacacacacacagagtatttaaatttctcctttctgtatctcttagtgatgtcattctgctgagtaagagggaaactcccttttggggagtctctcatgtaacaagaaagtaatccacggaaggaacaagaagtgtcctaaacagtagcaaaccttacacatcaggacaatcacacaggctctggtgtcagattccagcttcaacctcatcggtgtgacctcaagcaactcatgcgccctctttttctcatgtgaagtgagaatatcattggccacaccaagggtagcctagaacatcagacagtccgtaaatatttgttagataaacgatgactgaatgaatggtgaagagaacatatacagaagagcctgactcacaagaggtgatgaacaaacactgccaaatgatacactgaaagacaagggacctcctgctcatccttctctccttgtcttctcattctagccctttccctttccactcctttcaattctgcctatgacccaacagtaaaatcatgtatttgtacagggccatactggttataaagctttaccttctacattttctcattcaaattttgaacctcatggcagacttacgagggcaggaggtacagttcccctgtcacagatgaggaaactgagacttggacagaaaacaggttccaaactccaggcagaaactctaacaaaaacaatgcattcaaaaacaatgcattcagcccaagggtgcagcctcaacgttgccaaaccgaacctgcctgacatcctgttgggcgggtaagaggcaggtgagggaaagacccagaagctagggggaggtattcgttggggtcatgtgggtagcccattaaaaatacggccacaggtccccttgccctgtgccctccctgtcccacacccacaggcttgccccgacccagtcccatgatcaccctggtcacatgctccctgtcaccagcttccaagtcatctgtgggagcaggaggtggacacaggattaggggtgggagactctggggtggccaggctgaggggaaggagggagcatgtcgggggcaggtctggaggcacgcgagagaggaaaggcaaggaaaaaaagcagggaggaaaggcaggagaagcagggagtgagaaatgagtagaggcaccacgaaaggtggagacggacgtgaagtggggaatcaagtgagcacttagaggagcacaggaaggaaaattaggacggccaatggggcctaaagaggcactgagggtcggggaaagagaagagatggattgactcgggaagttagggatactgagggagacacacggaggagactggggttcaggggagaaactcagggtcgaagctggggtccctggggtccacaagttcgagatgagacacgggcggtctcgggatgggaattggggacgcagggggatgaaaagatggaaggtgggggcactcagggagtcacataagggttaatggaggacatgcctcagaatcggagacacgaggaatatccaaaggagggtccggcggagacttgggagtccggagcgccgaggaagttggggaacggacccccaggccccgcccacccgcgaggtcactcacctcggcttactcagcacttctacttcctcctacttccgcaaacaaacgggcctcgggccacgtgatggcctgaccaccgctctccgccaatcactggtggccctgtcccaggcctcctctaggctccgcccccgcgcccgaggacggcgggaggcggggtccgccattttttttaactgcccaatggaaggggctcccttagccaggaggacgagctttcggcgggagccaatcctcggcggcgaggcgcggccatgtttgtgcggggcagaaggtgcccggcttcttggcagtcctgttgatgagggccaggagtcctaccctagtccgccttccgcctcctaaagcgaccagagcctggagtctgaagttactgttaatgattgctcgtaaagataaaaataaaggcaacagaggcatagggcataacaaggaggaacctgttttgatttttgccaggtagcctcaagccagggttgccagatgtagcatataaaaaatacgggatgttaagttacatttgaatttcagctaaacagccaatacatttttttccgatagaacagaaattgattatagcttttttatttttcacaactaaggccaaattccctaggggaattaccacatgtcctttttttttttttttttgagacaagtctcgctctgtcgaccatgctggagtgcagtggcacgatctcgctcactgcaacctccgcctcccggattcaagcgattctcctgcgtcagcctcccgcgtagctgagattgcaggcgcccgccactacgcccagctaattttttgta

SEQ ID NO: 70144 - DNA, 644 bp, Homo sapiens
aaaaagaaatccaggtgagagatgatggtctgaccaccagcccatttaatcatcacagctataggtacgttacagtccaagtttgtgttacgataaaatacgtaagccattgctagaaggcattgtcaaactccttcctgtgggaagctttgtgagattattcttgagcagcagtgggcaaactatcctgcctgccacctgtttctgtaaacaagtgttattggaacacagccacgccatttgtttacacacgtttctgctttctgcagtgggagaattgagtaatcatgacagatacctcatggcccacaaagcctggaatatttctctctggccctttacagaaaaaaaaatttacccaccactgatcttaaattggatgtcaaaggttaagtaggagtttgccggctggattaggaaagagaacattctaggtggaaagaactgtgtgagcaaaagtcaataccatgagattgtgtggattgtttggggaccggcaaggggttgagcactgctgaaacctggtgtgtgagcaggagaacagtccccagaggccatctagaaagagtctccccctaatcccagcactttgggagcacaaaacggctggctcgcttgagcccaggagttcaaaaccagcctgg

SEQ ID NO: 70145 - DNA, 1285 bp, Homo sapiens
ggagacacaaaaatgaaaggatgtaatcctggtcctcaaaaagcatgtgggttaagagaagacagccatgaagacacagaacaccgagtcagagaggaaagtgctatcatgagggatacactggtaggtttcctaccttgtacacaggaacctgagtcagcctggggatgatctgggaagcctgctgaacaaagtggcatctgagctggggactgaagcacaagccggggagggagttccaggaagaaggactgggaagattgaaagcacgaggcagtagaagagaatgatgggtatgaggacagagttcacggtggctgcagctgagaggaggtggtggaagcaggcagaggccagatcgaggaggcttatggaaagagtttacactttgtcctgacagcactggggagccatggaagggttgtgagcagagcagtagcctggccaagtttaggttttagaaagctctctctatcctctgcatggaggctagaggcagggggaccaggcagaaggctgctgcaattgtcctggagccaggtgctgtggcttgaacagaggccatggctgagggaagagagaggctggagagaagttaaggagatgagatcactgaagcctggtgacttgtttgctgtgggagggagggagagggtgaggtgagcatgatggcctggtttctctccagggtgactggggaggaggtggcatcatcaacctgttggagaaattaggtggggagggtggcgctaagctccactgagacaacgtggagttagacgtgccagggaagggcaggggaaaatacatgtcatccatgcagttgcttaagcagatctggtccatgagagacagctgggagcccaaaatagagatctgggagtcctcaacatcaggtggcacctgaaatcttgaggtagggataaggttccccagcaataagaaaagagggcaaaggctaaagctctgagcctcgctaagaattaagaggccaagatggagggccagggatgaaagctgaaaagataggagggaaatctgagctttagaaggcaaggggaggtaggcatgtggctgcatgcctgtaaccccagctattcgggaggctgagacgggaggatggctggagcccaggagttcaaggttacagtgagctatgatggcactactgcactccagcctgggcaagggagggagaccctgtctcaaaacaaagacaaaaacaccaaggagaaaacagtgtttccaaaaagaggggaagaataggccgggcacagtagctcat

SEQ ID NO: 70146 - DNA, 719 bp, Homo sapiens
agagcgagactctgtctcaaaaaaaaaaaaaaaaattagctggtcgtggtggcaggcacctataattccagctactcaggaggctgaggcaggagaatcgcttgaacccaggacgcagagattgcagtgagccgagatggtgacactgcactccacccttgatgacaaagcaagactccatttcaaaaaaaaagaggaaaaaaattaaaaggaagggagattgcaacaccattgcatgctgtcaaaggtcaagacagattagggctaaaattggacctggatttagtaacaaagaggccactgggaccccggccagagtcccttcagaggtttcttgagggcagccctcagcccgtgagggattgggaatgagaggcagtgagaacccagaggcaatgagtggggatgacttgaggtttgcccacaaagggaagaaaaaacaagggtgggtgttagggtgagggtggagtgaaaggtggggttcaggggtggctgctagagatgacagccacttggagacatttcagtcccatctccagtgtggtggcaggtgcctgtagccccaactacttagaaggctgaggcaggagaatcacttgaacccaggaggcagaggttacagtgagctgagatcttgccactgcactccagcctgggcaacggggcgagactgtctcagtaaaaaaaaaaaaaaaaaatccagacgaccccagtaccta

SEQ ID NO: 70147 - DNA, 2940 bp, Homo sapiens
tccgggctgacgtgaaagatgagaaagagtcaggcaagtgaacagaagaccagacagccagtgccaagggcctgtcgcaggaatgagcttggtatgtttgggggacagaaagaagggcactgtggccgaagagcagtggatgaggagagagtggccaaagaaggtgtgtaaacaacctgagctttgttttgagaagaacattggctggtatagaaagaaagactttggaggcaaagtagggagcctcggaggctgctgccattgtccgggtaagctgatggtgccgagaccaggtgccatgactggaggtggtgagaaatggtcctatgcaggagacctggagacaccgctagcttgagtcctgaggtggggaggaagggagagggagggatggagccaggctccaaggttttggcttgagcagctgagatggggtggcaagggagcagaggtagggctgacgatcaggagcgggtttttgggccgagtcctctgcagtgcccatctgacacccactggatgcgcagagtgggcagctggctatgagtctggaactcagagaagctgttcgctccggaaatacaaacctggggctcatagccatataaatgtcatttaaagccacgggactggatgagatcattaaggcagaaggtctaggtcgaaagaagagggccaggaccactacctgtaaaatgagccaatgacacctacacccacggggctctcgcgaggtgtcacgtgaacgcacccagcgagccctggaaccaggcagagaatcgcggcagccccgggggcggggcttccagggggcggggtcatacgggggcggggccgagggaccaagcggccgctcctggccggagggcggccgggtcggtgacgtcaccgcatgactgggtttttatgaatgaaaggaatcctgtgagtgagtaattccgggaagctcgccttacaactccgcgcggcctcggccccctgcgccgcccgccccacaacaaaactcagcgcagcgctcccgggcgcccggttcagagcgacctgcggctcagagcggaggggagactgaccggagcgcggatcgggacagcggccgggacagcggcgagacgcgcgtgtgtgagcgcgccggaccaagcgggcccagaagcgggtgaggaacgcgggaccaggaggacggtgcgcgggaccccaaggcggcagggtttctgcgtcccgggatgcgcctggggtgggcgcccgggcccgatccgtcggggctcccggagctccatcgcccggacggctcggggcggggagaagggagcggccgtcccggggacgccgaggacggggccgaggccagctcgggggagtgggggtggagacggggccccttcccggggcgcgggcgggtaggcggcggcgccgggaggaaggggcagcgcaggccggcgatctccgcgtccgcccggcgggggcgggggcgctgtgctcctacgtgactcggtgggaacaggccctggcccggcgcccgcgggcggtgcgtgcgcggtttgtttacgtccgagggcgggcgtgtgttccctggcgggcggcctgggtatcctgcccggtgcgtgcgtgcgctgtgtacctcgggggcgtgtgtgcgtgtgttgtgcttgtgtgtgcgtgtccgcgcgcgcgctccctggggcctgtacaccagcagtgtgtacctcggagagggcgtgccctgggccggccaccggagtaaacgcggaacaaggacccgagcgaaggaagcggacccgtgcgtcttcgcacggggtctgggaattctggcccgggccgccccagtcctactacccggggctgtccgtccccggctctccccggagtttcccagggcctccgccacgtgaccccagtgtttgtctcccgcccagagcccgcgcccgcagccacagggtggggcaaggtatcaaagaccccacccagctgagctaggagtgagggatgtgagccacccccgcttggcaccccggtggatctggtaacaaagtgagttggagcccaggttcttgtccccagattttggggcttcctggggagggaagaaccaagggactctcgttcgtccccagggttgcccatcccctcagtcccatgagaacaggaagggccagaaaaccttgactgcaagggtgcggcgcagggagaggaccacaggcttttagctagtccgggttctggaggctgtacctgctaggtcgtggaggatggggcggagccggtttccgctctcctggtagtttcagttcacaagtgggactggtgagactagactgacctacagctggacgccggaagctagctgaggctctgagccagccgacagaccccgagtgccctcaccctgggccaggcagggtcagtaggcattggggatagaactctgactgcacggagggttaatgagtgaggggtggggcctgacctagccgccacccacccactcacccaatagccctgcagaaagcacctgtttgtcgtagccgcctgcaggatgggctgggggctagagattccttggtcttaatccaccttccccctccacccacccacccacggtctatggaattgtgggaggggagcaattgaacttgctagggtgaggaaccaatgatcttttgactttggatctttgaaccctgggtgagctctgctacagcagcccggaccctcagtattcccatctaccactgggaactaggtaacagccaggatggcaggatggtgggtagaagggggaagctctggaagtctgtgcagacagcgtattttccaggtgaattgtggaagagaaagcagggctgacagccccatgccaggagctgggggtacccaagagtaggtggggtttgagtcaggagggttggggccaggagcacaggaaccagacaggcccaccctcaa

SEQ ID NO: 70148 - DNA, 1527 bp, Homo sapiens
ggagaaacaaatcatagatgaggaaccaagcatgagaaatgcagaagaggtgactgttacaagggttaataggcggggttatgtgatgtgacacagaggcgtttagccagaatggtcaaagaggacctcctgaggaggtgacattgggcaaagacctaaatgatgaggagtcaccatggggctagaacagtaaagagcacagcctgtgcacagctcccgcggctggaaggagccattcaaggaggcctgtggaccaatgtggagagaggaaggtggcaggtatgaatcagttctaagatagcagaggccttgaatggcaaggtagtgagtttggattttattctaaatgggaaaccaaaaacaaaacagtgactttgacctcctttctaccctaggtctgcagcccagagggcaccttctgcaaacatgtctgtggatcccctatccagcaaagctctaaaggtgaggaggcagcctctgtcaacccagtgaagccctccctccctgcccatgcagagcctcctcatcccaacttccccttctttcctggaatcccctgggtggctcagcaggcaccaggccttcatgatgccaaagggaagggccacagccatgggctgggaccaggaggcctgggctctggtcacaggctgcatgtccctggggtaggtcacttccctctccaggcctccttccccatcgggtcaatgtcccctggggcattcaaaggtgctttccgacctgggtttctctggctgagtccagggcttggcgctaggttagaattcaggctgagccccggggtggcctccttttgtgtcccgatcctagtctggcccggtttccccttcccggattcctgctccccttcggggttttggatcaagtccacccaccacctcggcggctaaggcggtgaaagaggaacaccgcgggtggagcgggggggcccgtccccagtcccctggacctcagtttcctcatgcccgcagatcaagcgagagctgagcgagaacacgccgcacctgtcggacgaggcgctgatggggctgtcggtgcgcgagctgaaccggcatctgcgcgggctctccgccgaggaggtgacacggctcaagcagcggcgccgcacactcaaaaaccgtggctacgccgccagctgccgcgtgaagcgcgtgtgccagaaggaggagctgcagaagcagaagtcggagctggagcgcgaggtggacaagctggcgcgcgagaacgccgccatgcgcctggagctcgacgcgctgcgcggcaagtgcgaggcgctgcagggcttcgcgcgctccgtggccgccgcccgcgggcccgccacgctcgtggcgccggccagcgtcatcaccatcgtcaagtccaccccgggctcggggtctggccccgcccacggcccggaccccgcccacggcccggcctcctgctcctagtgcccgcccccgccatgcctcagccacgcccctccggcctcagctccctccccaaagtgcctgagcgccgcctctg

SEQ ID NO: 70149 - DNA, 2362 bp, Homo sapiens
ttagccagtcatggtggtgtggttgagcccaggagtttgaggctgcagtgagctatgattgcaccactgcacaatctaggtgacacagaccctgtctcaaaagaagaagaaatttagggttaaattccctgggcatccctttagtgaacagacagtcccacccagagaggaaaaaacccagatttcagagtaatttttccagcactttcacattgagatctgattttctacagccaagtggaaactatcttccccatgtttcggaatgcccagggaggcagggagagtggctttcccagcccccacctgcaggcctaaaccataaccctgtgtcttgtcctaggcctcaaactcactaatttcaacccaatctgccagcccttctggggcaccctgaagaaggagtggagtatactgtggtctgtgggtcacggcaattggggtttgaatctaggtgtctgttcttagctgtgggatctttggtacttatttggtttcttacagtctcagtttaccatctgtaaaatgaagatgctatggggcattacgtgcgaaaaaccctggagacctgtggggctgcaggttttaacactccgaacacacatttacagtggcacagaccgaggtgaggccaactctatggctgggtatggggctggctgggtatggggcccgcggggtaagggaccagttgggcgaaggtgcaggatttgagtccgggaaagggccagatcacgtaggtaggccgtgtccacggggctttctccccttctcaggttggggctcggtgctttccctgccaagcccatgaccctgaaatgctgagctcaggcctgcgggaagggcagcaggaagctgcgggaggacgcaggctatttacccgcctcgggaggctggtgggaattcccccacccacaccgcattcctgagtgctcccgtcagcagcaagccaggccccaagaaggcatgcggtaccagagaggccaggcactgtgcccacagccagcggccccctgccccagggtccctggccctgagggtcccagggtggaggacagtcccagagacgcaggaagctcgtctgaaagggggatcccaggaaatcctgggagatgcctgcaggagcggggctgccagcatgtgggccccatggacctggttgaccaaacagggaaggagcatcgaccgcctgcggcccggccgtcctgggttgggaactggctggaggttggggagaccctttgtccaaggggggcctgggccttgaccttggtccctatcaatccgaacccccatcactgaaaggttacacacaggaaggagagggtttcctaagccgcctgtacccacagccactccacccaccccaaagccagagcagggggcagggaggaggaaggaaaaacctcacccacaggcagagatttcaatacaatctatattatctcatatatagatttcttcctcactttatttgctcacttctgtcacgcatttaaaatgtcacagagaccaaaatagagtggctttctggtggaactcatggcagtcatacaacaagatacaaaactaggagactctgtcttctcatacatcatacaattaatttttcaagtattctttatgtacaaagagctactctacctggaaagaaaattaaaaaaaaaaaagacaaggtaggttatgcatcctaaggaggaggaggggatggagcggtcgggcacatgttcccgtccccacgaccccacggaccgctgattccctgccactgagctccccccaccctccacgcaaacagcaacgctgggcaggcgaaaaccaagggagtgggaatcagcagcactttggcctggagggagaagggaagccacggtggagagacagcttggtgaaagcagatggcggggcagggccagggctggtcctcagcctgtgtctgcacccaccctcccgggcagcttgggcccaactgctccgcccccccaagatggagggggagagctggcctctggcacccacatgcaggcctctgccacgaggaaaggaaggaggccaggaagacggctgggccccaactctcctcacaggtggcagggagggaacctgttcattccaggaaggaccaaaagaaagaatccccagtgaacaccggcagggtccctctcccttaccctaccagcttctccaggtgactgcagcccaaacccagggataatctgggttttaaatgccaggacactttgcctgtagggacacgtgttgtgacacgaggctcttcctaagtcaggagctagtataagcccagcctgctgggggttccggaggccccaggtctagaggtgtggagggggagaggaggggc

SEQ ID NO: 70150 - DNA, 1587 bp, Homo sapiens
ctgctttgccccaaaatgccctggaaaggagggaggagtaaaacgtctggccttatacaacacctccagaggggatatgtattgggaatccatgcccaacccccagcataactgccttgccttggcctggagccacccagcactggaggtaagtggatccaagcgaggtaccaagggtgtgcccaggaggaaatgtacaattcacgggaaggatacagacacccaaaaccagtctccacggtccctttgggggcaaacatctttcgagccccaggtcccagtcgatccccttccaaacctgcggacctgtgtggcgggcgtgtacaccctccactcacgacgcagccccgaaagccccccgccgaccaccctcccaggtcactgccacccgcacagggcacggacgcctcccccactcactcggccgtgccagtcgccagcacacccacccgggagcacacaatccctcttgcaaagcgccttggtccatccgcctccctctcccggggccgccccccggacaggtccgattacactccaggagctgcccccgccacgttggcgtggaaagggagcgggcacacccacgggcgacctcgcggggcggagaggaggcacgggtggggagacggatgccccctccctccgcggccgcaccggcctccgtagtgccctccccgcccgggagccggcggccgaagccgggcgtccctcgcgcgggcctctccgaaacaagcagccccccgcgctcgggagtcgcagctcccccttggggctcccgggcgaggccggccaggcgggatacctcaggagcccatggcggtggcggcgtctgcggacgatgcgcggcagccggactctgcgggcggggcgggcggcgccgcagccccggagtctccgccgccgccggcgcgtcccgggcccagtggagtgcagccgcggcgcgcatgcgctctgggctcgccgccggggagggcggggcggcggacgcggctgagatcactgcctgggccttaaaggggccgcgccccgaaccccagcccgccgccccgaaccccagcccgccgccccgcgggttggggcgcgacccgggttctcttgccactcacaaaaccagctacgaccggcccccaaccgcgagagctttctgggctgcgatctctgcccctgaccctcgctggtgcttcacttcttttaaccctaatttcctccatttgagcctgttttgaagatgaaacgaaatacaatggctatttgttgagtgaaggatgcgtgtggaattgtggaatgaacgtggaccgagtgttgtgtgcaattaggccagatgaaatggcaaagcactgaaagaggcctttttttcccactccgcttagcagcgattctttcttgccccgtctggctctaggctgccgaactagcaaaagtcttcagatagggttcaagccgcctagtccatttctgtttgccggtccagacatcacctaggttaactgaacaagataaaatgcaattaagttctggcattgatgtgctcaagatccccaaatgtatttatgtctccagactcctcgcctgaactgtctaccc

SEQ ID NO: 70151 - DNA, 1002 bp, Homo sapiens
gtactactgtttgtatttcttttttcttttttttttgagacagcttcactttgtcgcctgggctggagtgcagtggcatgatctcggctcactgcaacttctgcctcccgggttcaagcgattctcatgcctcagcctcccgagtaactgggattacaagcagacaccaccacgcctggctaatttttgtattattagtagagatggggtttcaccatgttggccgggctggtctcaaactcctgacctcaaatgatctgcccgccttggtctcccaagtgctgggattacaggcgtgagccactgtgcctggcctactgtttgcatttctgtttgacatgtggaaaaacagacaccaaaggtcaaatgatcatatgctacaaacttcccagggacagggacccaagctgctaggcaaagcctctgacccccgcaagtgctggaaacctgccagagctgcctccccctgcagcaggtcctgccaccaatgagttccttggtggcctctaaattctatcaggaagccgccaggcttttctctgagctcccttaattcttacaaccgctaagctgaggttcagaaacgttaggtaactggcctaaggtctgacagaactggatggggcacagccagaatttgaaacttagtccccaaagtccctgtgttttttctccactcaaactccaggtgaggcttcctggcagaggctgtgtctgggagccggctgagcatagatgcaggggtgccccacatgcgaaggcctagaagctagaactgcccgatttcaggaacagaagatgccccatgagtcagacacagtggagggaatgccagttcccaaaacaaacttggacacagaaaagggcttggacttggctggccctagaggggctgggaacttggcaagttccaggtggccacgggcgtggccagcctcacacgggggcctacttgacacctacacagacacatggacacaatcggggacatgggtggactgg

SEQ ID NO: 70152 - DNA, 2504 bp, Homo sapiens
tacactccaacggaagaaagaaaagcaggcacacacagtgagccctgttggggggtaagggggggtgtgcacgcaacccccccccaacacctcagtccactttctgccaacaccaattcagagaccacacatggcagccaggaaacccgcaggttaggaaaggaacataaatatacccgcatcctatattacataaatacccacgccgggttatataaatacccgtgccctctgtctgggtgtcttacataaatatactgcacatgaccccccagtctctccccactcaccggctgtctgcagagaacgagagcgggaaggggcaagcccttcaggaccccctgactgctatgtgccagccacccagacccccagtcgctccccaacaccccaggggtccaaggtccctgggggagcctagactgtcccggcaccaatacccaaaaagcctcccagaggagagcagaaaagcttcattcaggaatggagaggcttttcagttcttttgctgcttctcccatgggggagggggggagataaacaaagtggggggaaaagtggatataaaggttcaagagtttcagcaggttaaaaaaattagacaaactaccaaccagcatggcacacgggcagtgcttcttactccccgaacaccatcgcctacccctgagccggggcccttgtccctcggacgattaaaataaaaattgaagggacatcatagaaacgaaggcaaaggagacccaaacacaggcattgcttggaagcaacttgagacacttgtgtccccttctcctctctccaaatccttctccaggaaggaggctatgccaggaagaaaatatgcaagaaaactaagggaaaagttggggagggggctcaccccacttcgagttagggtattaacaagagcttgggaatcctctaacgacacccagacactgttttgcgttccttagagacttgcaagacatcaatctctcacacaaaaatgggagaatccgatccgacaaataacccccacccctttctttctctccacaaagaaaaacaaatcagtggcctggtgaccacacacctcttcaccttaggacccccaaacgcccgtcatccaacgagcgggcgcagccttgcgaacccccaggtccgggcgccggggccgggagagcagggggcgccggtgattgtccgatgaaacgctacgcgggcccgaatcaacagtatccggcgcccagcaccccaagccccctccctcagcgtccccaaatcacagccggggtggccgcctggccggccggggcctcggagggcccagcggggggaagcggaggcaggccggccggggggcctcccccgcgagcctgcaaaataacaggccccctcctcctcgtccccagccgcgcctttgtcctcgccgggccgagcgggcggcgcccgggctgccccccctacaccccagcgcgaacgcgcgtgtgtctgccctcccttccctccctctccagcaaaaacaaagaggctgagggagcccgattccccccaggtttgcacccttccgcgggcccgcggccccccgatatttaccccgccgggaaggcgccgatgccgggccactgctcggggggctgccgcgggcgggggcggcccgccggggcggatgccggaggattcgcggagccgcccggcgcgccagcctctcccggcccagccgccgccgccgccgccgccgccgcgctccgctcggccccggccgggctctggctctgggctctcgccgccgccgccgccgccgccgccgcctccctcctcccggcctcctgcccgcccgcccgcccccgccgccggctcgcgcgctctcgcaccgcgcgcgcccgccggctcccattgagccccgggcccgcccgctgatgtcatccccggcccgccgccgccgccccggaggatttaaagggcccgcgccctccgcgctgggggccgcagctgcgagacgcagttccccagcctcagtgcaggcgcgcgggcttacgcgtgggggtgggggagcacacagatactgacaccctaatgcagtccagggcacaggtggaaaagacggggtgcgggggggacagagggaagaggagggcgcacaaaaagcggaggtgaggggatgggaggggagggtctagacccaaagtctcctctccccgcctgccaggatctctctcctctccaggcagagcactgggcccctgcgaaaacaggcggctattcacgacactgcaaaagatgttagactgctggaggctcagtccgcctccaggttccgagtgccgcagagaacacaggccaggttgattcagggcaagagatttgaggagacagctagggatgtcgacacaaggcccagaaaggtagcctgggctcatacattctcctcccgtggaaaaacgaagggcaaagacctcttcttcttttccctgaagctcaaactgtgatgggcacagagaggacccctcagatcccaa

SEQ ID NO: 70153 - DNA, 541 bp, Homo sapiens
ccaagggtttgctcaggactctggcccaggaaatgggggactgtgggactggaaggggcctggtggggagcagcagggggtgctgagcttgtttggcaccctctgagctggagaagtgtgtggaggctgggagaggggcccagagggactggaggtatagacaagacatgctcccagcttccctgggtcgcaggccaggcactatttgatagatgagatcatcgagttccagggaggaaggagagcgggccatgtcaccaaggtcacccagtgatgagcatccctgccgacaggagtccagctatcccagtccctccacagtccctgggactttgctgctgaggggctcgggctctccgggcgggagtcccaaagacaggaacagggcagacttagagcccacatggaggctgattctttgggcggccttgggcaagtctcttcacctttctgaggctcagttgccgcacctgtgggtgtgaaatgcctccttccataagggttggaaggattaaactagagtttatttttattttttatt

SEQ ID NO: 70154 - DNA, 2530 bp, Homo sapiens
ccattgcactccagcctgggcaacacagcgagactccatctcaaaaaaaaaaaaaaaaaaattgaaaagatgtagaatccatcaatacccagaaaagtcaatacctggaaaaaactgcaatgagaaaagctagacgcaggaagcagtcatctgatcgcagccatgggctctaacaaagacaggggtgaacgcaatgaggtgaaatagctgagtcggatgcctcctaagttcttttctattcttctgtgagctatttgagttcataaggaagataaatcttccagaagctggtgggaaggaagccatggtgaatctacaaggattaggcctgaaccgtggaattccaggcaggcaggcaggtgtggccagatgagggcggggttttttgctcccattagatccgccctcttcccccctccctgtcttcctccctttcttcctcttcctccttccttgtcttcctccctttcttcctcttcctccctccctgtcttcctccttttcttccacatgcatgataccctcttcattctctccatcctgcccaccactcctgctccccaagaggctgtgaccgaagtggggaagagagggcagggcagggcagagggggtctccttaccctggctctgcagggaagctggtgtggcatgaggagggcttggcagcactttaaggccccttcagcctgcccgttggcacaattccaagctccgtgacatctaaggttcttacacccccagacgcagcaactccccccaccccgctccgtcagcgccgcaggagccggagtggagtgagggatcagaggagcggcacgaggagggaggcaggtgggagggctgtgaaaggggaacaggtgggagagggaaggtgagtcagccccgagcagagctgagccagcaggagtttgcagcgcagccaggcctgggagcctccctgcagctgcgggctttcggcaccgcgtggccccctcccccagtgcccacactggcactgccctttggcactccagaagtcctggctttgggctttcacttgcctcttctgtgtgaccctgccacaggtcaccttgcatgtgaccagagagaccaggcctctcccaaaagagcaactaccacaagcatatgagcaagctgcaagctggtgaagggcctggggggaccttggaacgccccatgttgctctggatggtggatgatgggccctcttgggggtaaccccacatgtaccccttccccaccctgcatccgggcctctcgcacatcttagaggagggtagacatcccctaagacgtgctctaggtggaggcttctgagtctgggagcacctgagcctgaatcctcttcagttactgctcgtagcccaggaagccgtggcatcctggggatgtggtgggaggagtggggagacctggcgagacccacccagggcctgcagggctggatagagggacatctctcatgagcctccagggtcaggattgagaccctggggtactcacctgacagaaggggaccaggggtccttccagaatgtgggcagatgcgccactgaatttccttcttgctgagcggcccccacaggctcttcggtgggggtgggggccaaaggccacaggtgcactctgggaaatctgggagggcacagaggaggaaaggaagcagcccctccccctcattgagcccccacctgggagaggatggagtgaaggagaagcaggctcccgggcctctgactgtcctcactttgtttccagccagccccctggttctctgggcctctatttatttcctcatcagtaaaaggaggccataatccttgtcctggcttcctcttggagtttcgtaagagttcaatgaacccaaggacgtgaaaggtgttatgcaaatgagagacattatgagttatctattgggaggcttggatcctgagcttggctctgtctccaggaaagaggcctcaagtttccttctgcagcagcgcagcatacggggtgcacagtgatccacccaaacggcagctatgctgccggggctggtgagacgtggtcattcacaaggcagctcgctgtgctgcacagcaggtaagcttgcctgctggttccctgtttctagaggcagctggcacctttgtgtggaagatccctgggacccagaagggtgccttctgcttcctttcagcctggggcacacagtcagcctgtagagtagaagtcgggtgggaggaaccctcaaactccaaggctctgggatagatgaccaactatggccacagctccctcctgctcggcatgtccttggcaatgtgactttgcctctttcccaaaaggtggaaactaatttcccaccctttgaatctgggctggcctcgtgacctggactctggccgatagactgcagtggaaatgatgttatccaagttcaaggggctaggcctccggagaccttgcagcttctacctttgccctcgtaggttgctgcccggagtcgccatgaaggaatgtgatgcagcctattggaggagaac

SEQ ID NO: 70155 - DNA, 1071 bp, Homo sapiens
acccgattttacaggtgagaaaattgagaccaagagagaggaaggcccaccgacccaggctgcagccgaggtcagtctgattctgctgctgagtggtgtgccattaccattgtccacctgcagcaagatcgggtcccgaccgggtggacaaccaaattaacagacggaggtggggactccgcttccggctcgccccgccccaccccactctcccagggagggagctccagctccgggaagatgaggacaatagcaggaatcgccccacagggtacttccacgtgctggctcctgccaagcgctggcaccagtgttatggggcctgtgtacagatgaggaaactgaggcagagattggggcttggtggcaggcctccagtttctgcggagggaaggcagagggcacttggggcatgggcgacatgggtcgtggcgggcacccggcgcacacggcagccgggcgcaggccagaagcccccccgcgtcgccgggccgcccagtccgggagccgggcgctgggatgggcgggaggcgggatctccgggccgcgccgcttcctggctccccaccctgcgccggcggccgccctggccacgtcaccgcccggccaagagtgcgtgggcggcggcgcgcgggtgcgatcgcggagctgtgaggcgcaggcagggctctggggcacctagagaccggggccggagacgtggcagccgccctgcccgccagaaagtttcctagaagtttgctgggcgcgggcgcacgactgactggctggaccatgaacgtgttccgaatcctcggcgacctgagccacctcctggccatgatcttgctgctggggaagatctggaggtccaagtgctgcaagggtgaggggcgcctggcagggaggtgcgggaccccctctctggccagcctcatgcccctgcgtgcagggcagggcgctccaggtgtctgctcagggtggggactccggcgtgggggtccttgaaactttgcggagctccacttccaaaaacaatgtaaagttgtataaaatcagaggaggaggacccctcgagatgatgggaggcgg

SEQ ID NO: 70156 - DNA, 947 bp, Homo sapiens
aaaaaatatcccagtggaaagggaagtggtagcctaaggatgactattataaaattatgggaatcaaagaacttacctgaagggaacatttaagagaccatcgcttgacaggaagtgaaaaaaggccctggtgactcagctgaaaattgcacccctgtctatgaggtagaagccttcactttccaggatcttgtaggacattggtcagaattctgccattttggtgggttttctccctcttttgattttttacaaggcagcaaacaaaggggcccaaaacaagcactgatgttgagtaacaagaaacagactcgggtaccttccctctcccctcacttggatgagtgggggtgggatgaagagtctaagttattctaatggtagccaattaatttggtttagaaatgcaaggggacatggagcaaatatttttaattgtctaggcaagatgcacaaagaagctaccagcacatagcaagcctgtttaaaaaccaaccattactgaaagctttatgtaaactgctttcaggcctccgcctcctctcccaacaggcccaagttctaatggcacagatccagacatgacctcagagggcagaggggcagagagaactttccatcatggctgcaggtcaccacctctgaaggagggaatgatgagtgcaatgcataaaaaggcttcattacttttgtattccagtttgaatacctgttctctttatattatatagtataagggaataatatggtacttctcaccttactgggcaaattaaatacctgtcaataatttaaggatttccttgtaatacaaataatctttttttttaaaatatagaagttctgagttagacctgtttagctcagaatagtgggctaaactaccataaaattctctgtatatcttaaatggtaatgggtcaaaaactccagaaaatcatcagttg

SEQ ID NO: 70157 - DNA, 3160 bp, Homo sapiens
tgttaaccactccctttcctatcatatttgcacatatccttaattaaatgtgtcaccctaccacaacgtgctttttaactcaacacttctgtgacttatccacattaatccaagttcttttctctttttcacggctgattcaattgtacgaatacccacaatttatggagacatttgcgttgtttccaatatcctgttagcacgaatgctggtatataaacttttctgtacaaggatcctggggtacctgtgcaaggatttctctaggcattacagtctagggtataaagcttagggaggaattgctgggtcgttttcaactttcctagataatctcaagttctttttctaagtcaatgaactgaaattcacttctaaacttagcaatactgtcacacgcgaagcaaacattccacctctcatcctctaaacaatgagataaaatattttccttcctaataaggtataaatcaaaataattttgtaaaaagtggcaactgaagtgcttgagactagtaaatccagcagttgtggatctgaaccacaaaagacaaaaacgtttggagaaaatatcgttaacagagcgcctactacagtgagactattacatccattatctcttaattcctgacaacacagcaaagtaaaggcaattatcacgttcctcagaggaaacaggctcacaaaaggtaggatcttgaccaaggtcacacacacacatatcaagtggcgtcacgtaactctttggggaagcgggggggtcgggggagacggagtttcgctcttgccacgggctggagtgcaatggcgcgatctcggctcactgcaacctcctccccccgggttcaagcgattctcctgccttggcctcccgagtagctgggattacaggcatgcgccaccaagccaggctaattttgttatttttagtagaaacgggatttctccatgttgatcaggctggtctcgaactcctgacctccggtgatccgcccgcctcggcctcccaaatcgctgggattacaggcctgaggcaccacgcccggtccacaataccaagaactttctagcgaggcagaatagttgacgctgcagtccaattagagaaaaaaggctgaaatattaagattaaaactaaagtaacgacccaaaaacccatccttcccccaaacacggtcatttagatggcaagcaactccactgctttacatcccaatgcatttcctccgacttaaaatataactgaagagaattaaaatctatttctaaaaatgagaagttggtcttttcgtctcccgtgccttaaacagtgaactctggggagagaacgtcaagggtgccatttcgtgtaaggctttcctgggctgaagtgttctctcaggaagatccgcgtttttcagatgaacgccgaggcctggagacatcgaacagcccgcccgaagcggcccggctcgagagccgggaaaccaggcgaggcgccaaagcccgggcctgggctgatgcggccaggccgcccctcccgatcccccgcggggctgggatggggccgggccgcgccacgacggccgtccgcacggagaggcccagcgtcgccaagcggccgccctcctcgggtcccgagtgaccccggggccgaggtccgcgcacgaaaccgctgtctcgcctcgagtcgcctcccctcgcctcccgggtcgagagcaaggctcccaggctcgcagtccgccgggcctccccaagaagcaactcccccacccccacgccaggcctctcctctcctcccccacccttaccctccacggtcacgatcccggtcccggtccccaaagcctcctccgcgcatggtcccaaaaggatagagatctgggagcggggcacggatggccgggctcgggagggcctgcggctccggtctggtgacgaccgatggcggcggcgcctccgctgttggggcggcggcaggcgcagcgctctctcgctccgacgcgctgtctcccgtcgcagacgccaccgtcgccgcctctctcgtcggagacgggagcaaaacacagagaatcggggctacaaagccggtgggcaggtttggctacgctcaaaccgggcagtgccgcggtttaggcgtctccttccttcccagcgactgcacaaaatggcggccgccgctgagtcggctccaacttaacgctgcgtacggcggagacgatacgtaaacagcgcctcggaatagcccgagggctccgcggggaactacgggtattcttggaagcactttacgtcagttgcgacgatgggtgtattttgcggtctgtacaagaaaaacaaagtacggagcgagcgtagagttctcgcgccacccgaactagaacgtgggatgaggtgggaggaagcgcctctggtgcgacgtaacattctttgcgtcgttagccggcctgctgttgctaagatgcgcagtatgcgtaacgcattctgtttagagaatagaggattttgcctgattccgatctcggtacagaccccgcggccggcttgaagaagttgctttgcagagacaataaccgtcctccatattgttatcaagtttcagagtcctctggcgccagaggccgggagggtcttaaattccgtggctggccttcctatatggcgccgccagccctctcgccccaccgccctgggcccgctgagaatggcggcgggccccggcgccatttcctttccgttgcctttcgctgctctgtctccggcagccatgatggaagagccgtgtccctttctttccggagtttgtgaggtggcgatgtcccttccaggttaaagtgccctcagctacatttggttcacactgaggtgcattttctgaaccgtatatttttaccgtccctggccgagcacagctgttgctaatacagaaacaaaatgtgcttggaggccaggcatggtggctcacgcttgtaatactaacactttgggaggccgaggcgggaggatcacctgagtcccggagttcgagaccagcctggccaaaatggcaaaaccccgtctctacgaaaaatacaaaaattagcaggacatggtggcgggtgcctgtagtcccagctacttgggaggctgaggcaggagaatcgcttgaacccgggagtcggaggtcgcagtgagccgagaa

SEQ ID NO: 70158 - DNA, 789 bp, Homo sapiens
aagaccgaagggcggggaacgagcgggctcacaggtggggggaccagagggcgtggcctggagggggctcagggcgagggggcggggcgagggctgaggcgcggaaaacgaagaggagccccagcgggtggcgagctgggatgacggagggagggagggaggggcgctgtggaaggagcgcgctgaggagcggggccttgaagggagaccgttgagctggggcgtccctcgagctgagcacctcgctaaagtccgggagaagaccctgaggcggggttctgaggaggtagccttgagtcgggggaggggcgatgagcagaggtggctgactttggcgataggtcttggtcgcgagggttgcagatggagccttggcttagaaggtcgaatccgggcccgtttccccccgcccccgctgcccatggcttctcttttcacctccaggttttcatgctggcttcagagtttggccgtgctccctcagcgttcctaatttcccactttctgactctcaccatttgccactcttgtctgtgattgagacacccgaggcccattcaggatggagagtaattttttctctgtcttaacttgaagttttaaatagaccacagacgccaagtatattttggttcagcttttaaatagaagtcgcaggccagccttcgtgccagcagcgccatcgctggcagcatcctcctcctcccctcacgcggagactgacttggggagagtcaggaaacatttgagagagcagctgccgaggtggaggctgtgatgtatcttgga

SEQ ID NO: 70159 - DNA, 486 bp, Homo sapiens
actgcctcagcctcccaaagtgttgggattacactgtaatgtacgcaactaatcctaaactggttaccatgccttgctttgtctttcctgctgagaaacttcaaaaaagagtgtggcctgtcccttccccatgctcctttctgcctcctggccagcactggtgcttcccgctgtggccctgcatggtgtgctgagtttaacattactcatgatttccagggcgaattgccaggggaattgcaagtaacatgaaacttttctttcaatggcactgacctctctgtactatcacagtcaccaatataaattaagacctgggtgcaaattagttccaaccttagtaattactggtttctggtgggggacaggagcagtcatcatgtcttaaatttattttcttctggtgtcagtaacctctcttccccacagataacagcactgtgctgacctcatcaccacaaaagtggaacttaatcagtgcttagg

SEQ ID NO: 70160 - DNA, 1120 bp, Homo sapiens
agagatggaaagtaattgcaactcattcccctgaattgtggactctcagacagactactgccattgaaatgcatattttgaacacagccagctctttcattgagcagatgggaaaacgtgtctgctcttgatgagagaggctctatccccaccacaaaacccaattactccctctatcctggtttgcccattaaaacttcagctgtgctcaaggttccagagtttttgattatttctattttgggggcagtaaatggaatctcttaactaggttcctgaaataactgtcagaagagtttatgtatttcagtacaaagaacacacgcttgtttcaagccattgtgacaggcagtacccaaacactgaataatattttggtcttggtctctgggtgatggctgtccctctgcagcacctatgtcatctgcactttttgggaactgacgtttacagagcacagtcatatgctaagcacagggccaagagtttacatagatgacctcattcacgaagtccagaaatatttgttaagtgtcttctttgtgttaggtctgttctaggaggtaaaagagatagaacagcaataaatgttacccaggctggagtgcagtggcacgatcttggttcactgcaacctccgccccctggttcaagcaattatcctgcctcagcctccccgtagctgggattataggcacgcactgccacgcccaactaatttatgtatttttagtagagatggggtttcaccatgttggccagactggtcttgaactcctgacctcaagtgattcgcctgcctgggcctcccaaagtgctgaagattacaggcttgagccatcgcgcccggacagagtttaccttctaagagagggagacaaactctaaacaacacatcaacccaacaggaagataagtactgtacagagattgagataggttatgggaagacagaggctggcagtcagggacagcttctctagggcaatgacagtgaacctggcatctgagggacaaggaggaaccagatttcccctctggatccctgaggaaagcagattccaggcaaagaggacagcgagtgcaaaggcccaaccaggcatagacctggcacgtccaa

SEQ ID NO: 70161 - DNA, 1753 bp, Homo sapiens
ctcacaatgcaacctttaagtagtccctgggcctcagcttcccttgcttgtagaagccgccataacggcacggggagggggcaggctgccagaggtgggtcatggtgcgtctgtccgtccgtcttacctgaaagcatcggcggaatttgacgaacccggggccggtcccgccacgggtccctcaggggaccccgcaaagttctgggtcggcccccgacagccggtgcccccaaactcacagcaaggggtgccctttgccttgtgctgggggatgaggaggggagttggggagaggcccattttgctactctgagtccaggcgttctctaggcaacgccggcgcggtctccactttcccgtttagcataacaatggaaccttcgtgagccgccgcgttgtccgcgagatgccgtttctatggtgacagccgggccgggggcccagaccaatgtgtcagtggagagggtgaatgcaggtcctggtcctagaggcatgaaaaggaccccagaagacactgcctttgtataatccgtttgctatcccgaggtgattcacggagtttctggggattggcgcaggctggcgctgggaacccccgcgccggttacccctttcctcggtggtagaggccgggcggggcagcgcatgcgcgtggcgggcaggcggcaggaggcgggtgggtcaaggtaactctgggctacagagtccttgctgggggttcggggagcgcttggaccccggcttctgggacgcgtcaggtacgtctccgagtccggcgtcgccggccagcgctgcctgggttcactcgggggcccgagctgagtaggacgtccgggcctcgcctggagagaggcttcaggagggcctggggaaggggacggaggccgggcgaccccgggcggtggccgccctcctctgtgtgtctccgcggttgtgaattggggcggtaattcctccccgtaggtcgccgtgaagatgattgcatgagatcgtgcgtgtgaacgtttgttgacagctgttacttgagtccgacagccctgggggccgtgcatctgcgtaacatggctacctctgaactccttgggggacacgtatatctttgagaatccgatgaaaaccagagattccgcccttgttttcttagaattaaagtaagataatatattttatggcctgttgcaaacggaaaacctttacacaatgattagtgattagtatcagtatctgtggactgggaaggctctacttactcgatcctcttcccagggtcgttgtgaggatcaagtgcacagcttcctataaacactaaaacactataacatcttgtgagccaggtactattattattcctcagtgcaaagaaagaagccgaagtccaagggggataaatgctggggtcccactgtgggtgagccgcagagtgatcattggaagccaggtgctcccccttcacttcctgtgtgcggagcacgctcgccctgggagtttcactagaaagaaggttgccatgggccagtgggacagcttgtatctcaagtgcacgcggatgccccagaatcccaggatctcagctgagctgtttgtggattattagatctgacttaaaaggtagctaatccagacccttcctcatctgtaatacatggatgacagctcccagctgtagtgttatgagaattagtgcggtcatgagtaaggtgcccagttaaagcccgagaagtaaagcagctgggccaaggtctagcaggcaact

SEQ ID NO: 70162 - DNA, 1456 bp, Homo sapiens
ggccacctatgctcgaataaagtgttgtcttggagcctgttgtaaatttaagaataaacttttgttaaaaaaaaaaatacagtggctcatcatctcttgagttgttttcactcagccactcctaccttagctgtgaacttaaagtaaaacaagcccccagaatcttgccagagtcagccctttgatctttgttctcccctgaactctattacctggaattaaaacaacgcatttgaaaaaaagaaaaacaagcaagtttctgagctcaccctatacccgctgaacagaatgactgcggtggcgccccagaacctctcacaggcctctcagctgctgctaatgcccgccgaagccccgacgcccggataaggccagggctgccggacccgctgcgggcactggaggacccggggctagagggcgccgctctcgcccggctcgcgcctcggctcccggaaaagcagctctgtccgccgttcggctgcgctcacctcctttccgcttccggtgtcccctacagtcatggctgccgccgtcgctgctgccggtgcaggggaaccccagtccccggacgaattgctcccgaaaggcgacgcggagaagcctgaggaggagctggaggaggacgacgatgaggaggtactagggcctcgcggggtgcagagcgggaagcgggcccgctcgtgggtgtgggatccgcgtggtacgggatcggagcgaagcggctgctttgggaggcggggttaggggccctgctgggccctgggtgccctagctccagtggggctcggcggctcccagtgccgcagcggggccaggaatggatgtcgctttttcggctaagacccgcgtctactccaccacagctagatgagaccctgtcggagagactatggggcctgacggagatgtttccggagagggtccggtccgcggccggagccacttttgatctttccctctttgtggctcagaaaatgtacaggtaaggaacgagggcaaaggcactgggtacgtgcatgggatggtcgtggtgctgtgaaagaacacggggtttggaagcagcagacccgtgttgggtgaccttgggcttgtaccctatcctttcttagtttcctcttctgtaaaatggggattcttacctggcaggggagttgtgggggttatttcagattgttggagataattaatgaataaggagctttgtaagaactcaggagaatgttaaaccgccatcactagatgatacagctaccatagctgctcctcctgtctctggtaggagtatggtgtaaggagcgggtagaatacgtttatcaaaaacattggagtatgtaatgtgagaggtttggttactgggtagttcttgcctgttttgtttgcatgtcttcatgctcaccctctggggattttcctctgcaggttttccagggcagccttgtggattgggaccact

SEQ ID NO: 70163 - DNA, 2405 bp, Homo sapiens
cacgtattccacgggactgttgaagatcactcaagaaaacacagctgaggctatgagtactttcctagcccaccgtaagtgcctgataaatggtagtgattatcttttcatgtcttgtgtcccttatacctgctaacgcaatctagctaatacctacagctttgaaggtttatgaagctgagacactgccccacccacagaaatccagaaatatcagtatcaagatgccaaggagaagggtcccctacctctggaaaatctcttgcagcgtatcccgggtgaaggcattgctgtcctggaagacgttattgagggcgtggagggcacaaagctccctgcgctgtttctcatggtagatttgtgggggtgctgcctggggcagctccaatgattcagatttggccttgtctcctttccatggcacacaactcatgttttttgttttaggttccagagatggctataaacaccccactcttccctctagaggaagaatgtaagcttctcagtcttttccggattcctgaggtccaccttattctctggtgtccatgatttatgctttgtcactgggagaaaagattggaatcaaaaggaaaaaaataaaacccacctcttctctcttctcaatagaaaaataacttttggattacttttattttgctaccactgtcaaagtgcagaatttaaaaaaacacataaaatgtaagaccttgtttccgtttccccacccttccctcccacccccctccaaaatccccacgattttcttgctgtttccctctgcaaatgccaggcctcaaagcaggaggaccgaacacaatcggtcacatcgctccttttcttccatttcttttgaaccacgacgccaatgactcgggagacaaggcctgggtgacggataaatttagcgcacgagtcgagtagctagcgcgggccggcaggcgtgggaccgcgagccgcgcgggggcctcgggggcagccctccatcccctcgggtacggtggggcccgcagggcgcggctccctcggaaggcgcggattctagccctctggccgcggccctgcggaggaggagacaactccggtcagcggcgagcgggcgcgggaagtgagcggcggggccggcccctgcccgagggaaggttccgcgcggcgaagggctggcccgcgaggggtggggccggacagtcagcctcgcgctcccgggcccgcgcccacccggctcgcagcccctacacaaacctccccgcccgtcacgtgagcgcaggcccagacgccctcccgccgcgcccccggccgcagaccccagggccgccgggactgctcgccgctggcggtcccctcaccgcagccggccgccacctggagtgcgcgccgccaactgggccgtgcgggcgggcgcgcgcacctgagcccgacgtcagcggcccccgcccggcgcgtgctccggaaacgccctcccgcgccgtcctcactcctcccagccgtggcgtcacgcctgacgtaagtctgacgtcatcggcaccggcctgggagccgcagacgccgggcgtgtaggggcgcagttcaacggttggggtgttgcaaaggccgtgggtgtggggctgcgggctgcgcacctcggcggcggccggcagggttggggtccagccgctccgctcggcgcggcccctggcggggcggcctgagggagtcctacctggacgccagcctgcccttctcccgggcgtgggcgttgtttcggggcggcagccaggccagcggctgcagtccgcggctttcagcacccctcccttctctgtgccgggcttttcggccgaacgttctcgctccttctgcgttgactgttttatgtgtggttaacgcgcggctcaccaggggggattttgaagcacctgattcggtcgggcgcaaattgccttggttagtgggcccgaccgtgccgcactgtccagggagcgtcaagggtaggtgtctcgctgggagtcacatttcaagtggaaaggagaatcctgttgcagttccttggtgtcgcatttcggttcactacacacaagccactgccttcttgcctgggggctccccgctcttctcacggtggctttcctctctgcagagacctctgcgcgaggtatacctaagcgcattgtgtgcgtcttcgggaaaaggcgaaaactactcgcagtcccacgtggatttcattttttcccctttacctactcttagggtgcgtggtaggcatcattatccaccttagctgcccttcttttgggttttctgtaaaactggaaaaacgagaagaaactgttgcacttcaaatttagttgttttgttttgttttttggagacggagtttcgctcttgttgcccagactggagtgcaatggcatgatctccgctca

SEQ ID NO: 70164 - DNA, 2955 bp, Homo sapiens
ggattccttatcttctcaaacatgctcttgtttgcttgatgcctggttcgagtggccaaggccgacattcatagacgttggttaatccctaatttcgccaaacaatgacggcctaggcttttccggcttttgaaacaggaattcaagacactaaaacgtgtgttgatggcattttgggttggggcttttcacaactgatgacactggaaaaataatccataggaaactaccttatgagaccctagatttcggtttagcagttcaccacaaaagtggtgaggtgttttttggcttttaattttagctgcttgcctctgtttttagttcgtgtgattgcctccgcaaaggcagtgaatggagaattctccctaaggtcagcatttaattattgcctcactctggctgctatagtattacaactcttggaacttacagcatcgatcctactattaaagttgcctggagcatgccagcacgttggacatcggcgttccagcaactgcctcagtcactgaatcgagtgggaggctcattttgcagtttactatctccatgagcaggtccaggcgcgggacctgttctatgactcgattgggtcctgcccttgtccgtcatcggaaggcttacagcgcctactgttttgcagtaagatttgcaggcttagtaccgcctctggaaacaaggagagtgaaggggcgttgacgagtaacgttgtttgtatttctctcctcattggatggctgctgtgtcagtcagacacttctctgcttccgttggcgggaaggcttcaggcgggtagcggggactcggtactgccccctcccaagctgggagcagggcgcgtgacgtctcagacatttgttgttgggatttgggcctcattaattattcattaggtacttgaaagctctgcagggattggtggctgagaggcctagtcgactgtttcttagctagaggtacgtgtcacccagtacgcggctggagttttgcataaattattccgataaggagcggggcggggctctgtgcatagattagtcaaatgagcctgggagggagggaagccggctacgaattagcctaagttattaaagatggcgacggagcgcagtcgctccgcgatggactcgccggtcccggcctctatgttcgcccccgagcccagctccccgggggcggccagggccgcggcggccgccgcccgactccacggcggctttgactcggactgcagcgaggacggcgaggcgctcaacggcgagccagagctggacctcaccagcaaggtaggcccgggcggcggcggcgggcgctgaggggagcgggcggctggccgagcagtctcccgggcgacggcggggccagcggccgccctgtccgcggggagcgcggaacgggaagaaggggccgagcccgcccacctgctagtctccgggacgtgcgggggttcgcggcgcgaggggccgtccccatggtccccgcacccaccttggctcccccgcgtcgccaacccagcctcccgccctcccgtctcccgccgagatcgtaacccctcggctctgccacgtggaacgggggcgcccgatgccagctgcgctccgcgcgttccctgtccccgctcagtgcccctccccgttcttcgggtccccacttgaggggattcggagaccgagagtctcctctccctggaccgcgcgggacagcagaggggcgagggggcccgggcagggggccgagacgctcatgaagacaggtagtcggaggccagggcagggtggccgccgcgtctcttcccagactcgggaaaggaaacagaaagtagtcgctcagctggggaggagcatgtccgagaatgtctacttttcgaggccacccgaaacaaaatggaaagatggtcaggctccttagtctcgctatcctgtgagtggaagctcatcttgtatgagtggagcagtgaaggacgtttaaaaccgtgttttttgagctgtcgagaaggtaggcaggaattaaggcctcgccaacggcttgacattgtgaagaatagaaaagtaaatacaagatgtgactggtgttttgaaggtgcttaacgttccttagggaaagaatgccaacttgggagtcagacagggctgggttccctttcctgccctaccatcgaaaggctctgtgacgttgggaaagtttcttaacctttcagttctccaaccacctcatcttaagaaagtacagatgggttgtaaaaattagaaatatttaagaagacacctaatagtgcctgatgcatactagagactcagtaaatgtttgaagtgaacgagatagttcctaatttcctgtgcagattaaatagcagtgggtgaaagatagaacaccaataccaccacttacatttgtaggatagttacgatagacattttatccagctttgaaaatgtttgtgactttttatagtttatggcggcaaatttgcatgaaacttggtcctaaactggggaggaactttccctgcaacctaagcaagttattttcaactgctctttgccattgtagtctcaggtgagcacttggaagccagctagcctgtcaaagttggtcctgtcttgtgcctgtaaggccataatgaggatggccaaacttagagagagggatggccaggacgatgtaaaagacccaggaaacatccaggttacaattacaagctctgatgagtcaactcaggaagttacaagattatggacctgactcaagagcaaacaaactggatgtcaacacatggtcaaggtgctgaagaaacatgataggaaattgcagggcagagttgcaaagacggtagtaccttcatttcttgaccagctcatttaatattcctagaagtgttatttcatcacatagctggggaagtcctccttacaattaaaaaaaatcatatgtatattaatatcgatgatatca

SEQ ID NO: 70165 - DNA, 1429 bp, Homo sapiens
ctggtttccacaaggcttagccatggcagaacctcgttttattttaactctttgcccctacaaacaaacagcagtacttgccagaaccattcttgggattcaggagctcgggcgactgccttggcctctggccgcacccaggagggtggggttggatctgtgtagttgccaggcccacacctgccagcagggggctgactggatccatgctttactgtgtttaatgggggtaacaggggtccctacagccctcccagctaaacatttggaacaaaacaccagcccttttgtagtggatgcagaataaaattgttaatccaatcacctccaatggcaaggcctgacccttctgtgtgtgcagcaggtgtttgtggcgtctttcccaggagtaaggcctgtgatggtgggatggggatggccagacccctgactccacagtcaggactgttctggcttatcagccaccctggcacagagaaggtcacagggatgaatatgccacgcacaggggcagcacaggtttagttgggttgggggaagtaccatggagccggcagtgtgagggctgtgctgtgagggcccagtaggatttgaatgtacagatgggcagagggcatgtgcccagcccaggctctggactcttgccacagtgtgtggcaacttccaggggcttgtttattggtgctgcgtggggatgtctcctttgtttagatggcgtcagaggcagagcaggtgtcagtgaaggggagtgagcacaggaccagctgtctcccaagaggctgaggagctggcccaaggctttgggggctggatttgtgcctcacccagctcctgccttgtggctgtctccacagtcctccctactgactggctttctgcctttgttttctcagccatgatgaggagcagccctgggccaggtgccacggtcagtatgagaggctccaggatcaggctagagaaccacgcgaaccaggtctggggagctatctgtgggaaaggtcagggcctgtttttctcctaagctgctggctgttcaagggacctacctccttgtcccttcccagtcacaggtccaaggggcaaatagcgaattcccatggaggagaatcactgcactccaagtggacgtggctggtaggtaagtgtaactttttctgctgctgttcagtggtactgagagacaggaaagccccactgctcccgccccaccctttgtgatgggttatcaatgacagctaataaagccacctcactgcttcctcatgccagcccttgacccacaaacactggaggagacctgcctcaggtcccatcccccaccacaactgggctttagctgaaagttgtgggtttctgaacttcaggaataagtctttggggacattcgtttggccaagaattcattccctcatctgcccaagagcag

SEQ ID NO: 70166 - DNA, 1339 bp, Homo sapiens
aagcatggtctttaattacttggtgcagtcattaaaattgagctgagagtcacataggcaattcatatgaaactagccaagctgtcaagtaaaaagctgaacacaaaatgtctatataaacaaggaagggctgggtgcagtggctcacacctgtaatcccgacactttgggaggccgaggtgggtggatcacttgaggtcaggagtttgagaccagcctggccaacatggtgaaaccccgtctctactaaaaatacaaaaattagccatgtgtggtgctgcatgcctgtaatcccagctacttgggaggctgacgtgggaggatcacctgagctcagaaggtcaaggctgcagtgagctgtgttcgtgccactgcacttcagctggggtgacagaagaagactttgtctcaaaacaaacaaaaaaccaaggcaggcctgtgctagcgcctgggatgattcaggacagctggtaagtgactggtgtaaaaagaggcacttatggccgggcacggtggctcatgcctgtaatcccagcactttgggaggccgaggcagctggatcacctgaggtcaggagttcgagaccagcctgacaacatggagaaaccccatctctagtaaaaatacaaaattagctgggcatgttggcgcatgcctgtaatcccagctactcgggaggctgaggcaggagaatcacttgaacctgagaggtggaggttgtggtgagctgacatcgcgccattgcactccagcctgggcaacaagagcaaaaactctgtctcaaaaaacaaacaaaaaaggcacttatttccctttgctgcttcattgtttttactttaaagacagctcaagatttaacttcatcttgtaaaaataactccctcatagcagatgtccctgttggagtggaaggaggatgactgctaatgataatgggagggcatcccgcttttcacccaatgttgcggcactagggtgtgctcctgcccagggcggcacaaaagaggctcaggagaggtggggagggccatgcagagatgatccagggtccagggctcaggccctgcccagtcacaggcacaccccacccagtcttgccccttccctgcctgccaaaggtcaccaccctctggtgaacacatctctgtgcctccctctgctctccccatgcaggctcaccatacgtcaggcacgtcagcaagagcagcggcagcaggaaccagaggaacgtcttcagggacgagaagcgcctggaccacgcgggagggcaggacgggggaggcggaggtgtgaggggagctccaggcctccacgttccacccagggagtaccctgaga

SEQ ID NO: 70167 - DNA, 3759 bp, Homo sapiens
gcctcagcctcccaagtagctgggattacaggtgtgcgccaccgggactggctaatttttgtatttttaatagagacggggtttcgccatgttggccaggctggtctcgaactcctgacctcaggtgatctgtccacctcggcttcccaaagtgctgggattacaggcatgagccaccacgctcagccaaaaggatttttcttttcttttcttttaataatagagacagggtttcaccaagttggccaggctcccacctacgtcctgatggcgcttgcactgtctgtccccacggtgcacactgtgctgccacatcttggtaagatgatgataaaatggtaagtgtctgctgggaccgggctccttgtatacctcatttatattattagaagcaaggtaggtatcattactcccatctacaagggaagaacctggacactgaggcaatgggtaacttgtccacagtccccagcctgtaagtgccaaagccagggtttgggctcagctctgacaggctgtagggcctgggtctttctactcaggcataaagttttccagttgtttcaggaatgtattgaagattctagttgtgtgtcctcagctagaatcttttttagcctcacacatgcgcaaaacaaggctgtatacaaacttgttacacaacaaatatttgttagcaaactaacaaaatagggaggaggagggcagcatgaattacagtcagttccggtcaccatgtggggcagaaatcaaggctctggaactgataatgaggacaaaggaagccaaagtgcaaagatctggcaagaggtagcattctgtgacatgaggaagattaatgaaccactcaggtctagacacccgaattcaaagtccccgactgccaacatggggagtctcaacgttagtgcctctgctggcccgtacaacaaagtcacttgggaattcctagcacttgcttgtgacttttgatcacttctaatattcctggttgatacttaaatgaccagttctctgggttgtgtggtgagtatagaagtccacttcccaacccaggctgcagaaacccgaaggtctggttagtccagctagaaagtcctcctctgaaaaacaagcagcctcatgtcctggccttgttggcatcttcccaggtcagacgcccatctggcatcccctctacttttagctggtgttggaaaagggaccgattggtagtaggaaaagcaggaagttggcctgggtccttgtctctattcctgtccttataaggtaatctcccctcccccctccctgccccgcccgtacggtccctacctgaaggctccagctgcccacacagggactcctcttagcctctgtcctgctgaaggaggtgacacctttgcccagggcagaaacaaggcaacatgtttataccatacccaagctgccgctgggaagaactaaatattctgatggaggttgagcggggagtgctgaaaactgtcagcacccgcctccgccctcccagaactcccagagatgcctctcagtctttcctgcggcatcctggcatcacaaaacagtttaccattgagtctgggtttcacaagatgaaaaaggtcgaggccccattctccaaaacaagaagtgagcctctgggagctgaaatctactactgcgaatcataatagacaccacccccgccccacctcctccctaacaatcagttaggaaacgctcatcggaaagcatccttccccacttctcagctgggcgacttcctttctcaattccgcccttccccatcacaaacatctccatccatcttcagacttaaaccagatctggggcatcttcctcgtgacatttccactccctgggcacagccaggccacacgcccttgtgggacctgccaaacgcccggtgctaactccctctgccctcattcccacaggccaaacctgcagaaattgtcaccaaaggcgcgcctcctggctctctaagtcacaccgcgccccccattgctttgttttgttttgttttagaactgaacaaaacgggccttcctctgaggccctgagttctgacaggcagaggctgggaactgcctgtccctggaaacggcctgtctggcacaaaacccgtaggcgctgcccggggccgggttggggcagtcggcctttgccctcctcctcccgggaggctgcccgggaagtcccgcccgcagacaccgccctcccggctgaccagtggcgcggcaggcggggcgggggccaggaggtgagtcagggcgcgggccgcggacccgggtggaggctggatccggcccagcacgtcccggagaggaggaagcaggcctggcggcgcggccccgcccgagtggcccgacggtgacccggggtcaggccgggccgcggccccccaaccctctcctgagctcgcccgcactcacctgctgccgcggcggcttctagcccggccgggggcgtccgaggccaggccgccgccggggcgcgccccctttccgcgtggggatcccgcgggcggcgctccgctcagggcgacacagcggccgggcccggggcgcgcgggcacgcgaagagcggcgacgcgggacaaggcgggcgggcggacaatgcggccggcggaggcccgcgctgcgcgagtggggccgggcggcgcgcgtgtggccgactctgtatgtgtgcgcctgtcagtcaacgctgacaggccgcagcccattggtcaggccccgccggccgtcaccgcccaccgccgccacccattggccggtttgaacacaaagccccggctcgccccgccctcgcgtgggccccgctgccctgcgcgctcagcctaggagtccgcgcgtgggaggcgctgggcgggcggggaccccgggctgcgggaggacgcgacgggagcctgtgctggggctcgggctcagcagggcactggactcccgatctggcggctcagaacacctgagacagctctgagcgctcccacgcgcgcctgcagcctggttcaccaggccggcgtccgaggggagggtgggagccctgggagcggcagcgcgcgggtggcccttggtgcactctcggtgaggctgtcgagggcttgctcaacacccggcaccagtgccgttgtcctcttagccggccatttctacacccatttttcagacaaggaaacaggttgctaatttggggattccagacatgctgggaggccctgcctcttcccaagctttacccagagcacccaagtttcacgacagctcttctattttttgtttgttttaaacagattttctattttatttaaatagagacgagatctcactatgtttgcctaggctggtcacgaactcctgagctccagtgattctcccgcctcggcttcccaaagtactaggattacaggtatgagccaccgcgcccggccagctcttctgttttaaggacggtgcttgctgcacttgagctgtgggaaggcagggctggccactcattcttctaccttactcagacttggaacgagtgctcagcgtttgagtaaaatgctgcctgactccgggggtcctgttccttggctccccatccgccaactgtacagatagagcaggtgcacagcttgggatgaatctctttctgtgccagcccttctaagggcagatgaacagtcgttattttacttttaaagtaccaagaggaaacgagacaagaatgacaaaatcaccgaggcaggaacaggaaggctgtggggtcggagga

SEQ ID NO: 70168 - DNA, 974 bp, Homo sapiens
acatatgcactgattaaaagcgcagggagggtaggtcttgagactgggaatccaaattaggtttgccaagttattttcacaatacacgatacctcccattggggagcacatcctctcggaagcctaaagttgggtcaaagaacaacgacatcctagaacgtcagagtggaagaggccttagagatcactcaactcaacttctcatttacagatggggaaactgaggcccaaacaggggaaatgaccagcccagaatcccagtaagtcgccaactctccaagccaagagcggtctgacctagttgatggcgaccccgcgggagagggaattactccgcgaaaggtcgagggatcaaggtgctgggggaagtcggctaaagggggacgcgggaccacgaagctgggcaggccttgggtgggtggggaagagcagccggcagagtcgcgatggcaaacctgtcacgacagagctcgcaggtcccgaagtgggggtgagggtgggggttgaggatgggaagacctggggcaggggaacagcaggcaggagaccgaggtggggcctcggcggcgggcgaggcctcttccgccctgcgttgcctcccgccctccctccgggccggccctccccgcctggctgcccgccgcgccccggggcctcacctgctcctgcgggggccggagccggggccgcagccagcgaacccccgccagggttgtcaaggagcgaaacaagagtgtcttagcaaccagcaaggaagtcctgccccctcaccggacgttgacgagaatttcacttattattggtggataaaagtatcaatcagagtgaaaggcccttataagtcaggcgtttgcaaggacaggggcgtggtttagaggccagggaggcgggacttcacttatagttgtcttaagcgtgcccgaggagcaggggacacattgaagttctttttctagggaaacaaacttcgaaaa

SEQ ID NO: 70169 - DNA, 2073 bp, Homo sapiens
gggggatgctgctggggctgggccaggttaccttcaggaggaaagttttgggtttgggtcccctcttcttgggcccatacagctcacgctccctctccctgcggccgaaaaacaccagaggttaaaaagagccccttcccgggccccactccgcgctgccctccccggctctcccgcttccccgcgcggcgccccagccgagcctcggcctcgcagcccctgccagcttccccaacaactcacttttgttcgaaggctgcaatgagccgcgagtccaggatgttctcctcgggctcccaagtgctgtacctgccgagtcacaaacgcacaaaatcaggatgaagaccagagagggacaggcacgcggcgagagcaagagcgcgcacccccaccccaggccccggtgcccgctgcctcccctcccgcgacgcccccggaccccgcgacactcacttgatcgcccaccccttccatttcaccaggtactcgatgcgtccctgaaaaacagaggggagaaaaacgggggtgggggtggggaggatgcggggacgcgaggaggcggcggcgcggggctgggcgagggagccgggctagcgggaccgcttcgccccgagggcccccggccccggccccggctgcggacagcggcggcccgccccgggcggcggctcacctttcggatccgccgtttgatgatggattcggccgcgaagacccgctcgcccactgcagacagctccatcttgctcagcggcacccacagcccataatactccctgcgcccgcggccggtgcggcaccgctcgcgcacgcgccgcagcgcccaggccccggcgggcgggagcgcggcggggcgcgcgctcgcgttccagctgcgggccgtcacgtgatcctcgcggctggcgcgcggttgccaggacctccccctcccccggggcggttgctagggaaagtcggcgctcgcggggcgggggcgcgcgctggctcttaaaggggccgcgcgggcggagggagcaattgccggccgacccgatgggtgcccggcttgtgggcacgctgcggccttacgcttatcaccccccctcacatcttgccggcgcccgatcgctgacaccctctccttgcctcttaatccccacgcgagtctcgccaggccccgggcggagaagggctgtggagcccgagtctcgccgccaccgcgcatctcccgcagcagcctgcaaacagttaaatatgatgcagcagaaatgcagttgctgttgccttgccaggccttgcgggaatttctttaaaacatcgccccccacccattatttatgtattcgtgggagggtggttttgtaaccagttcagaagagttaaaacaaaaacgccaccgcaggaagggggtgtgcggcgaatggggccgaggaaggccggagtgaccgtgggcatctgtctgcggccggggtctcgggcggcacctgtcctcgcccaggagaccggggaggattcggcggggccggtgtggcagtgggggagggagagggaccgcgggcaggaacgggctccccgcactccgccttgggcccacagcgggtcatcatctggtcattcggcagaaaccgccttcgcggtcatatctgtgttttccgattcccagcacccctcccggccccccgacctggccgcgtccctctccccgcccgcagctgcgcgaagcttccgccattgctctggggagcccagatcccagcttcccacttgaggaggggcgggggatcgagctggggctgtccaggaacggacacacaaaaaatagccctgccgcgcaaaacgctccactttttaaatgttgaaattacttgaactttatttcccattatgttagtagtcttgttctttgtaaaacaattttaaaaatacagataaaacaactgtccataacccccataaaaccattgttaacatcttcaccaatcttccagcctctgctctatgcgtacataaactcacgtacacctatgtatgtatgtatatacatacacatacacattgtctgtagatttaattttttaacaaaatgggatcacg

SEQ ID NO: 70170 - DNA, 909 bp, Homo sapiens
cttggcgctgctgtaacaatttttctaccacaggagacgctggtctgaaaagaaggcaacgcaaggaagagaacagagccaaggcacctgcagcgagccagagccagagccctgacatcacaaatgctttaattggttccatttattgtttaatccacttgaaattgaatttctgtcatccccgactggaagtgtactgacctgcatactacctgtgtttcctcacagcaggctgaaaagctgtgccaatattgagctcatccagaattagacgaagtttgtattctttttattacttcctttaaccctgaatcagggtccagaagcattttgttgaccattaactcttctctgtgaataaagcagcatgaggaacaacctcttttattcacagagcaaagctcttcgctgctcagccacagcggcttcaactctggcacgggtcctgaagtgccatttctagcacatgactcacaaagtaaataatctgtaaatgaaaagcctcttatcatactttggcacgaaaaacaaagcgacaagccaggcagcatttttccctcatatttgaaccccacatgcaccaagggctgttttatgccttgcacatgaggagtttggtttgctcaaaagcaaagtattggctaacatgtgtgtgcactagtaattgcatttctgctttgtgtgctctgttatctgatagaggagctttgtcaatatcctttggatctctctccaagcacagtcttcattatgatctgtgagctgatttacggtcttcttggcaattttacgactgatatctaggtgcatttgctaagaggacagcaatttagaatgatgtttctgtagctttagtctcctccgcacctttaataagaagaataatcaattttacattagaaagttatt

SEQ ID NO: 70171 - DNA, 1404 bp, Homo sapiens
gagaggtccctgggcagtgagcctgtttatagacacccttctcccttccttggtgtcgcagacatcgcagtccctctgaggggctgacctgccccccaccttctggaagctgggaggttggaagaggggacgcatgccatggacccagcacacagctgggaactcgaggcacacctaagccttcccttgtgctgtgcggagtccacacttccttccccactggagtctcaaaacctcccctcactcaacagggtggtgctgctcaaagctctgggcacacattagggctggggagggggtggtggagagggggctccagcctgcccaaccaccaggcaacggggcacctgcccctctctcagctgggtctggacccgcctcccaggctcaggctgcaatgcctttctctttctctttgcaattccgttgggtcctgcccaggacagataaagacagagcagcctgtctttattggaggttcctctgccagcgggaagggtccggggaaaaccagagccagagccagagccagagaaacatgaagcaccccggggcctcccacaccaatgcctgagcaggaatggggaggggccatgactcataaggccctgggaggtcactttaaggagggctgtccaactgcaaggacgctgtaagcaggaagtgaaaccacagagcttcaaaaaaagagcgggacagggacaagcgtatctaagaggctgaacatgaatccacagatcaggtaccgctgcccactctgcctgctgggcccctcctgccccttcctgcctggtggtcctgctgggcctcaaccctggcctccccccgcccctgccccagccctgggctccctcccctctggctcccctgccacacgaatcccagtcaggctctttgtcctgctgtgtggtcaccccactgctgcttctgaatgggctgcctcccctacctgcaccagcccaggccccgtgctgagactctcccttaaagtcatgcccggactggtgctccccgccctgggagggtgctccctctgtgtgcttcctgccactcctgagctcagaaactgggagaattgaaccaaagggtaattggagcaatcaggcatttttgttctcagtgttttgatgaaatttctgtaagaattactttgcttaaatacaaagtcttaggagagggtgcgggggtaggaatggtctctgaagcacatgataaatcgtgtcatccaaggatgactccatggtgagcagatgtccccagacaggttccactccaaggtcactcttcatcttttagaacatgaccagtggttgagcgtggtggctcacacttgtaatcccaacactttgggaggccaaggcgggcggatcatgaggtcgggagtttgagaccaacctggcccat

SEQ ID NO: 70172 - DNA, 1559 bp, Homo sapiens
gggagctgtgttcagtggacatgagccccgaggactcccgggagggctccctgcatgggccggtttctctcttgtgccttcagaaatccgatggagcggatgtatcgagacacattctacgacaactttgaaaacgaacccatcctctatggtcggagctacacttggctgtgctatgaagtgaaaataaagaggggccgctcaaatctcctttgggacacaggggtctttcgaggccaggtaccacccaaacttcaatcgaatcacaggcagtgttgcaggaattagaggactggagagactgatatgggtgagacaggaggatttatttaggtgcactggttcagcagactcacatccaaaaaggctgagcccttaacaaagacagactgaggtatttataagcaaacttacagaagcagaacaaaggcgattaatcaaacagtgacaggtcacataatctatagcataacagatgacttagcataacttggggccttctatagctggtggccttgcagctacatcaaaaggaaaacaggaactggctaaatacagacatttgtaaaatatagttataatggttctggaaaggagagacagtaaaggaatttgtcttttttttaaaaaatttttttaaaattttcttcaaccttgccctggaggggtgtgggggtggtgtctggagcccattcctttggccttgacttttcaggcagtgttataactgtcgttggagtgagctggctaggcagaggaaaacttgttcttcttttctttttaacccttgctacagtaggacctaagcagctggaaatgcagaaaacacaacaataagtaaaatgcccagcactgggctctcaattgtgtatttttcccacatttcttttttctctttttttccttttttttttttttttttttttccgagatggagtctcgctctggcacccaggttggagtgcaattgcacaatcttggctcactacaacctccacctctcaggttcaagtgattcttcggccttagcctcccgaatagctgggattacagaaggctgccaccacgcccagttaattttttctatttttagttgagactgggtttcaccatgttggccaggctggggaattcctgacctcaggtgagtcacctgccttggcctcccaaagtgctggggttacaagcatgagtcaccgcacctggccacttcccacagttctgtttttttgttttgttttgttttggtttttttttaagactgagtttcactctttgttgcctgggctggagtgcaatgactcactctcaacttccacctgccaggttcaagtgattctcctgcctcagcctgtgagctgaacagtcacatgagggtgaaggttgttgccacaagctcaggggatgctccagacagagtggcctgggatgtcgagtcacagctgctccatgccacggggacaagaggaagcaggagtttagtctgacacactgcccttccagatagagggcaagagacagaaagaggggctgaagtcacccttgaataaccacagcag

SEQ ID NO: 70173 - DNA, 789 bp, Homo sapiens
agccaccgcatctggcctttgttcttttgtaaactatacctggggagggagttgagtctggctgtacctggagagggaattgggggtgggaggatgggaggtgagccacctccatcagacttcccctgccaagcccgaggaaatagagaaagaaaggagcctgagggatctgaagcaccccagggccctcccactccagtcccacaaaaggaagagggtggagccaccctcatcaagcagtgactttttgtgacttttgggagagctgaccttttgtgacttttgggagagctgccaaaagtgaaacttagtgcctcagacaagcaggggcaagtctgctaaggaagctgtggccagaagcacagatcaggtactgccgcccactctgtccactgggccctctgctgccacttcctgcctggcagcccttctgtgcctcagccctggcctcccgctgccccagccccagccctgggctccttctcctctggctcccctgccatccccactcccacccaggctctttgccctgctgtgtggtcaccccactgctgcttctgaacgggccgcctccccggcctgcaccagcccaagacccctgctgagactctcccctaagagtcatggctgggctagtgctccccaccttgggagggtgctctctctgtgtgcttcctgccattcctgggctctggaactgggagaactgaactaaaggatgatgggagcaatctggaattttgttcacagtgctttgatgaactttgtgtaagattactttgtttcaat

SEQ ID NO: 70174 - DNA, 1358 bp, Homo sapiens
ggagcccagaggcgccaaggggaacgcgcttccgaagagccgggcgctggcaacccaggagcgcgccactagcgtgggcgccgcggatcgaagggattagaccccacgaccatcggagaccctcgggtgcctggaggaaagcgggctcccgcaagtcccaggacacccttcccacaccaggggagggagagtggaaaggagccagggctctggggacacgctcgttgcctgggctgcgcggaccgcggcgtggacaccgggggactgcgggggtctgcactgggctcgcggcgccggcggggcgggaaccgatcaccccgtgggagggggcggagcgccaggccccgcccccgccggccgcgcgcacgcacgcacggggaggggcgcgcgccgggattaccggcaaaccgagggggcgggggcgggggcggggacagggacggcgcgcgccggctccgagataaacacggccacgtgacctccccgccccgccccacggccgggtaaacaagccccggccgcccagccaaagccccgccgcgcagggctcgccctgctgcggtgagggcacgcagtgggaaggggcgcagcgggtgcaggacccccgccggcctttcccggggggtcgggggaagcggggtttggaggcgctgctgagctgtgacgcaggcggccttggggcaggtggaaccacccggaaccccgcagagccaggccaacccccaagccccagtccccactccgatttaaagctgctgcacagaagacacagcacgggctctggtccagactgcggggtgcggcctcgttcaggagacgccaccgctctggggcctcatcctaaagtgggcccaccagtaaccccagtcgtatagggctgtagtgaagattagatgtgttaagccacggaaagcatttcgatcagtgtggtacacagtgaaggcaaataagcctgagttaaatcaatgaaaagcccagggagcgtaaaagtctgcggctcctaactccagtctccccagcctgggtggagacagctcccactctgcccctggcagggtgttaatgaatcttgtcttgtctcaggcaatcttcagcagggccctgtgaggttagggcctcatttttataggtggggaaagtgaggcacagagaggttgagggctttgccctgggtcacacagctgtaaaccttcagaggtggaaagcctcagcacttctcactgaactggccaaaaggccagcaggcaagagtcctagtcatctctagtggagttgcctgtgtatcaggcagcccgtagttcacatctgcccagctctatgaccctgggcaaggcctcatttgctgtaggcttctgtct

SEQ ID NO: 70175 - DNA, 2206 bp, Homo sapiens
tagactggtgcctggtacctgaccaaccctcaataaatattttgagtgactggccgaaggaatgatgatctcgccctcttgtgctaccctgcgggctccatcgtagagggagttagtgctgtgcctgcttcaggctacacagcacgaaaagcactgagctttgtggaataaatcaattctcttttaagtggagaaaaccctaggaaaaaggagaaggaggaggaacagctgcctcaatcagaagagtaaaaccccaagcacagctggaggaagaaaagatgctcctgaccaccttgaccttcacccttggcccgagatgccaggactgagttttctctatggagaaagaagatgggctgccaatcagcccagttgagctcctgctctacctccctatctaacttgctcggtgaccttgagcaggtcacttcctctgcctgggcctcagtttttgtctctgttaaatgggaggaggtgaccccctaaggcccctcccagtcggcctggagcctcccaaagggctgcagggaggaggagacaaaggaaggacagtagtgcgtaccaggaaaggaacttctccccaaggatttccccagccttaggcgagccccctcgccaaacaagtgcacgggaggtgtagacgccaggcccggacaaagtctagccccaaagtgtggggttctgaaaccagcagaacagacacctccttaaattgcagggtgtatgttttgaagaaggcagatggggtaggagactaggggatgccccagcgcagggggcgggcttcagagccctggcctgggctaggagttgaggtgggggtgggggcggggaatagggatgtgctcgggtggcgtagagggggcaggatcggaaaaggccaaagtccagcaggaaaaacttcagaggccggaggagacttttccaaagctccacttacaacttgaaaggatttggtgccaagcgtccagagtcccgagttcaaaacccagctctgaccataacgcgctaggcaagtcctttcaacttgggcctcagtctccccatatttacaataaaaggggagcgaggtgggatggcgctgaggatccctacgtccgatcctaatctccagctcaggcaggctcggccgccactagcatcctggagcgacaacttttgttctactcgccctacacggtggcagggaaactgaggcacgggctggggagacgggcccagcagcgcagggctgccggggcccccgcgccccgctttccccttcagccccagcgtggagggagcggtgctggggacgggagggaccccactggggtcctgggagccgcccccgggcagcctcaccttccgcacgcgcttcttccggatgctctccacggcgaacacctgctcgccgatggctgacagctccatgcggggcggcgggcgagcgggcccggggccgggccgggccgggggcggagctgcggggccgcggctgcggcgcgcgatgctggggctggcggggtccccgtcaccctcgtccgggcgcgcacgcgcacgcgcacgcgcgcacaccccctcgcgctccctcacgccgccgacgttccatttttgaacctgcgcaacgttttcctcggcgccagcgagcgagcgcgcgcaaggagggggcggggcgggagcgcgcggaacggccgcgggctcggctcgcgccctgagggtcagctccgcccccgagccccgcccccatcggaaccccgcccccggggcccgcccccgcgggttgcgattgggccgcgggccgcgagccgcgagcgctgccgtgggacttatttggctcggtcaccggctggggcggggcggaggctcgcgcgccccgtcttgctgtgacgccggggcgggacgtgatccttaatacccaggcgggcgcctcatagcctcccggtgactgccaggggccgaagtggcagggcccagtggagccgacgacaaagtcaaggctcagagcggggaggccatttgctcacctcccgcagcggaggagactgggcccgaggcgcagcccctcgagttgcaggagagccgggacccaaaaggcttcccaccgtgtccggacgtcgcagggccgaggtctccctaatccggccttctccgcggcgcagtttggccagtgtctccacgtccgtccacccacccctccatccgcccttccatttgtccatccacc

SEQ ID NO: 70176 - DNA, 2987 bp, Homo sapiens
ccacggaatttctgccccattcattcatcctctgtgagttccttctgcacgcattgagcacctactgggtgctagttgatgtgccagctcgcctgagctttgcaacacctctgtgaggtgtgaaggcggatgctgatgacagtgatggttacaaaaccaatgaggaaagtgaggtgcaaaaccaatgaggaaagtgaggtgcaagagagatcgccacccacacagaatctcacaatcatcaggcagcggctgggccaggagtagattttccatctgggtgacccaggagcctgtgctctttcttccactgaactgaatacgtcccctagcaggacttaggaggggtaatacttggggaggtgggggcaggactagcctatccagtcccccaaagccttcagtagagggcatagagctggacctgcgttggggttaccaagggtagccaagggtagttttggagctgctgcagccgctgctcacccccgggagcctccttctgagaaggaagtattattgagcctacattgtgttgggagggaaaacgtggggtccttggagccctgccagccccctgccttcaggctgtttggctttgtttgtttttttggtcttttttttttttcctttttctttgggctgattgttctcattaaatctttttgtcctgttttgttttttacggggctgacaatgctgctcagtgcttagcgcggcttcctgtgtttctgccccagcgcaggcctcgatggggctgtgcttcctgttgtgagccgtcgccatggcaactggaggcctggtgggctccatgggggtatggggaggggtgacatcagtgacgtcaccgggtgagaaggcaaggggcaggggtctggagggggttgcatgggggaagggcagccagcagccagccggcgcattgctgggagctgactcacagcccgggaaggggaagaatgccctcacattcttttgggaggtaaacaaggtcagggaatgcggctgggatcctgtttacctgaccctggccccccgggggacccgaagcccttacaggacaacacactggaatagaaccagccagacttggggggctagggaagcaggggagaagagaggaaccgtgaggggcccccaggtgggggccagagacagaaagcccaggattccaatcacatctccactaggtgacagcgtgacagctctatgactctgagcaagccacatggcctccctgtgcctcagtttcccctatttctaaatggggagaatttctcgtgcagatggtcccttggtctccaatcactttgggctggtttcgggggttgcgagggtggcagcacagcccgtgcctctgcattttctccgttctccacccgcccaaggcctgatccaaggctagggtctccacgtctctgcctgcacctgaccctgctagggtaatgccccagacctgtagccaaaccaaagggccgaggtgggctggcctcgaagggaggtgatgggcgtgcagcccagggcggggcgcggcacctctaggatcccagggctggagttggtgcagctagccccgctctctcccctaccctgtgtccccccttcagctttctcagagccccacctcttatccctgaacctccagagtgacggcctcccctgctcattagggagggtccagaggagcccctcctggtgccaatggtctgtatcctgatcaaactctgggattccatggtgctgagatctgcaagaacagccccgggggcagggccggactctgcatctctaagacaaacctttgccacctttgaaactgaccagctgggaacaacgtgcccttcccccacaggtgccatgtgagggcacaggccatgcccccatggccacagttgagttggggccacctggcctatggctgagagtctgggtatcagagtctgactggctttgcggcttgctagctagggccttcggtcaagctccttagcctctgtgagcctcagtttcctgatctgcaaagcagaagctcccagggttgatgtgagactgagtgagttaattcacatgaagcccttagcgcatagtaggccctcatatgtgctgaacccacacagagccagcccccacagacccctgcatcctccgcagcagcacccaatgcccccgtctctgagggctcccctatgctgaacacccgtcccagtgcaggaacagtgcccaccagatgccccatggttttcccataaagggaccggacttgggtttccctggacagggaatatcctgttctgggctggcgggggggaggaagaggagcgggaaggacacggcggctccgcattcctggcattcttggcggccgccctgtccagctgcctcggcgctgccgggggccctggcctactgccatgctggcccgacacggcacagcagcaccccgcttggggcgccccttggacttggggtgatagaggacccatcttgtgccagtcccacccatcccagactatcgcagaagcaaatgaaccccaaccctggaagcagagattcgggggctctgggaggagtcagttaacaggggaggagtttctgctttcagttctaccttatggggctccctagcccacctaccgttccccagggaagctctcggggtcagagccggaagaggggagaggtagaagactcctgggttctagtctccagtgcccagacagccacttcccctctctgggactcagtatctctgtctgcaagatgggagactttgatcccttccttgggcaaccccagcattgctgcccttgtcacgctctatggcatcatcactgcctctctgcagagcctgtgcctctggctaagggcaggagcccatcccttctccgcactgggccgggcctggtgggatatagtggttcccaccgccacgcagccatggtatgcaggattcgaacattcagaggggagggcctgggggcggtcaggct

SEQ ID NO: 70177 - DNA, 614 bp, Homo sapiens
ctggggatgacgagcatgagcacctgttgggagtcacaggctcttcttggtatgggaaggtgagccgcccggagcctggttttcctgggcacaggttccgcaggcctccaggtggacagctcacttcagagatgggaaaggaggcctggcaccctgaagaagctgtcccaagatctcaggcccggggtttctggcagagtgagggcgtggcgaggaggcagctggggcaaagccagccgtgggagccaaggtaaacagcctcctccgaccccgcccccagcgccagctgcagcaggtaggaagggcacgagcgagcgtgaggccaggtgagtgatctgctcccaaccaggctggcagatcaaaggggcttgaaccccaccctcctcctgggcccagcacacacacacagatacacactccccggcccgcctgccattcccaccaagggacacacaggcccaagcaaccaggggcgttgtctgtggctggcagaggaagaagctgatgaggcctcccagagcctgcctgcctgagagtcgcaggccttatttagatcgaatgccaaagccaaccaacccctttgaagaagccctctcggggcaaaccacagaagc

SEQ ID NO: 70178 - DNA, 2845 bp, Homo sapiens
ccgccgttcccaggacgccctggcaccgggcccagcccccaggtcccacggcgaggcgaggcggcagctggggccggccggccaccccctccccaacagctggccgcggcccggggggctgcgggagaggcggagagggggcgtcgggaggggcctgaaggcggcccggccgagccccgcgtcctccctcccgggtgcgggccgcggggggcggccgcggaagggcggggcccccgggcgggcggcctgcggccctcgaggagccccgagaacaaaaggagacggcgacggctcctccgtggtcaaaacaacctgcgctggcggcagcccaaggccgggccgcggcctccgagccctccgccttaaccccttcgccgccgctgcctccttcctgcgcctggctggaggccgcaggggccgaccctccccgggagccggcgaggtgcgggcgaggtgcggactcccggccgcagccgggcggaggtgggacggtacccagtcacgccgcgctcccggctgccctctcctcccctccaccgcgcgcgtcgtcctgccccgccccctttcccacctggattccgggtagacttgccaactcacggctacgtgaggctgggaggggtggggacggctccgaccccagcgctccctcagatgtttttataccccatctcccgtgcagctaggcttttgcaggcggcgcgctccgcaccctgcatgcgggggagagaggtgcttcctcctgcagggcgcgggcacaggtacggcaaggcctcaggcacacagcgccccgggggctggattccttcagagcccctagtcctccccctacccgagtgcccgaaacctacctgcgtctctatctttctctccctctctctctccgtctctctctccgtctctctctctctctctctctttctctctctctctctctctctccctgttactcccaccccaaaccccgcgcccgagacacaagctgcttccagaccgtgctctggggccgggcatgccctgcgcgtgccggagggcgtccacccggaccccgaccgggagccagggtgggacccgagccccgtcaaaggtcggcgtggatggcaccggtgcgcaagcttgcacctcctgggcaagccgatggcaggacagagcctaagccgaggctggcgccgaagtgggctcgggaggacgcgctgccttctgcaccctgggcaccaccccaccccctctcccccggccgggaaggggcttgttctcgggttcccaaagggtgggggacagggccacacacaccctcccccgacacggaacggcttagggagccagattcgcccgccggttggaaagaaagccaccgctgttgccttcccttagagcctgtcacccccggacctcgctcccagcccgaagaggtcacccagcgcccggcgtcaggctcgcgggctgcaagggtccaaagttcactgcagggagaggagggggcggtcagaaggggggggcgaaggtaatgaatgaagaaccagccccagccgccgtggcaactcacctcggcgctgaccagacgcaggtagcagcagagagacaggaagagcgcccagcagcgattcatgccgactccgggcccggccccgcggggccccggacgcgtagatcgagcgcgccgcccccgcggccagggtggggggctggggaggggggtgggctcggctcgggtccgcggcgatcaggcgctcaggcctctgcagccgcggctcacccgcatggcccccgggcgccgccgcccccggccccggctccgtcgctggggggcaggggaggacctgggcgcaggacctgggtccgaggccgctacctgggcggatcccgagcccgagtgagcatccacggccggggggctgcgtcgcgaaccagccgaggcgtctagccgtgtgggggcgcccaggggactccaacctccaagaggaaaaggaacacggcagtcgatggttcgtcttcactcgccggctacaggcgttttcctctgcccgccggcttagcttttttgcaacattttctggaaaggcccccaaaatcggaaagcgcggagctgggcacctcaaggcccaagtctcccccaaaaaactttttccaaagttggctttgcaacggcagctcgagcacccgggcagggagaggtgcaaactcccgcccgggccgggtaggggggcgggagcgtgtgcgccctggcgcggggcccgggcggcgggcacggctgctccgcgcgcgcggcgtgcccgctgcgcgctcggctgggcccggccgacaggtggacgcggcgcgagtccgtcggtccgtctgcccgcccgctcgccgctctgggcgtcctctgcgggctgcgggctgcgagctgcgagctgcgagctgcggctgctccggttttctctttgcagcgaggctggagggtgggcttttttttttttttttcctttttgcgcgcgtatgtatgtgtgtgcgcgcaaagtatctctatctagggaatgaaaaatgggcgctggcggccggaggggagccctagggaggcagcgggggaggctgcgggtgcgcagggaggcaggcaggccgctcccggctgcaggaggagaagttgccaccctttcagctgttccggcctttataaaggagaagggagagtgcgagaggtgggtggagacagcctttcctcttctggcccggagtcagcgccaggaggggggggacgcgggagctgggggagggcttggggccagggcggggcgcttagggggtctctgagagccgagcaacccttcagtccatgaatctggccctggggaaaaaagaactaggg

SEQ ID NO: 70179 - DNA, 4622 bp, Homo sapiens
aaaactgtactaaaaaaaagtactttttaaaaagttaaacactgtgattttatatgtttcaaactcatacattaactcactgaaccacccaacaatccagggagagaaaaatacgttatccccattttacaggcatgaaaactgagtcctgggcctggaggaacaacgtccgcagcctcggtgtcgtcgtctgtagaatgggtatccagacacgatctgattgtggggagtgtgtgcggacgtgcatggcacgcctccggagttatcctcgggaagaattggccattccaccaccagctcacctctctggagccccctgccctagggggggcttacaggccaaagcaggcaggcaggtagacagtcggaaagacccagacgactgtataaacaccctggggccgtggttatataagtcaataagcaaacagagggcagccggcatgagtgactaagagtcttaataggaaccaccgcagccatgggcatagtacgtgctccccgggcacagatgtgctctggccatggggcacgtccctgctgaagccacagagttatcatcgatggtcccaggtggaaggggtgttccatggaggatgggctttcctctgccccttcccccttggggcaccaggggacctccctgttcttccttggataacgacagtgctcaccacgccccctcccagctgtgggaccctgggtgagtgtgattctggaacctgtcccatttggtaatggggttaagctagcaaatgaatgaagggggttggcacaaacggagcactccatacatgggagctgtggttaccttcctcccacttggctgaggcacctgaggcacaaacctcattcagtcgcacaatctgcctcaaagggaagcaagcggcatgggaaggatcatacccctcttacagatgggaaaactgaggctcagagagggaaagtgacttctctaacatcaccctgttggttagaggtggagctgggtttgaactgaagtcacagcactcccaggaaagtgctcaaagggagggaagaatgaattaagccagaaagacagatccccccatcccacccaccagtgtgagtgagatattttcccatgtgggatctggtgggggcgtgcagggagggtgagcgtgcctgtgtgatgcggtgtgaagggcgactggggggcctgcgtgcacacaggcattgtgggtgtaaaccaatgtacactggcccgggaggaagggaggatgaaaacaccccctggcagccagcaatgtcccactcgggagacacccagggcgccggccccagccgagcaggctagagaccccaggcgccggggcttcccttccctaaagaccaccagtgggggaggggaggatgcacctcagcctccaagcctcatctccctgtccatccccctccccagctccttcctgttttgatggaaggaaaatttttcagctttttccttctttatttttccagacgggtgactcgctcgggaaaggaactcccccctccccagaccatcataacacctataggtccatgccatcgaggcaggcccatcctgttatgctgaaataggcatggttattttggggtgccttacgggggtggtgccccaggggaggggacgtgggggtgctcagctgccttcttctagtccacgtccccctcccaggttcctccccacccccaccccgtcctccctgcccgagttctgggaggagggaaggaagcctgccaagccagggtataaataacccaggtggttactcagctcctgagaacatgataacatgagtcatgacgtgaaatcaacaggagcagcgagcgcccgggccgccgccccggcagggcagtgggctgcagggagcgaccgcgaggggccgggactgcagtgggcagggcccaggctgatgggtgaagctgctgccctgtgcctggtcccaggcaggcctcttcccagctcagacccttggtttactcatctggcatacacggggtgggggctgccttccttccccaggtcctcctgcagctggagagaggaaaggagggcgggggtgagctctgaacatccctggggcctttgcctgtgcctgacacacagtggtggacagaaccagcccactggaacttccagtcccctctccccatttccagggcagatggcccaaggggttccctgagcctcagtgggacttgcgggaagggaggaagggggcttggacaggagcaggagggtcctgagcacagggactgcagagccttcacccaccagggtggccctgaatccaggacaatctgcagcctcctctggcgcccgctgcagtgtggcctgaagcgtgggcacagaaacaggacaccctggaagacctccggccaagccagtgtgaccagcccaggcagcttggccgggctgctggcccatctctggtgctcgcaggccagggggcaaaagccagcgcccctgcatcctcacccacgtcctcggctccgggctcatctccagagcatcacaagcctggaccccaggttgccatggcaatgggttctggagtctgtgcagggcaagtcaccctctcctgtccacccgcagctgctaggcctggtggggggcagcagggcgatgtgtgggggcagggcctgtcctggtcgtaggacaaagggcggggggcacagctggtgctgctgacctgggctgggagctggggcattatcctccacgtggccttcagcaacttagtctcccagccgaacctcagacccctgcctgggcaatggcagaggagggggaggataacgcctgtcctggctattatgaggggcacgctgcagagggcgtgttatcaggagagcaaagacccctcttcctctttgaggcatcgccctctacacctttggccttatcagaagggcagcacccccagagctcgcaccccacctcatctgccctgacccttggcccagctttctctccaggtggggggttcaccgcacccaccgcccgcgacccctgcatgcccagacagcttggcatggctcagacccagcattcaacgggcagcctgccctctggcccctcacaaacaatggggactccaggaatattgtcccgcccgggctgaatcaaacgctctaaatttagtctctctgatgtgtcctccgtttcctgcccctgctgccctcctttcaaggcgatgaggtcaccccggaactgcctgccccagcagccagaccaagggggtttccaggcccaggactgctctcctgctcttggggaacggggtttcatggggaccaggggacatgggccttccctccttcccaccctgtgctgccttgccaggcccccgggctgctgggccccatggtcagggcctgaggcaaccctgtcccagcgctgaggacccaggaacatgccaccagcctgggatgggggaggccacggagggagggagcagtgagcccccagggaggaatctcgagctgagggaccaggagttcgggcttgttctgagaaacgcacagtgtcagagtcactcattcagaaagactgagagagcctgccgagagctgggtaccggagacgcgtccctgccctctcagagttgacagtccagaggcaaaaaggacaatcggcaagtaaatagtaaatgaacaagaagaccccggttgtgagaaaatgttataaagcaaataaatcagagaaatgtgatcacaaaccctgggtgggtgaagggtacaagtttaggaaacgggtcagggaaggcctctctgacatttgagctgagccttggatgaccagaaagaactattgaaagatctgggtggggccagaggaggggtgagtggcagatgccccaggagagaagaaagttgtccaggaggggcccgtgcactggaggcaggggacggggcaggcacaggggcagggggacgaagccagaggcactccctcccccagggtgctgagcaggggagccccctgactcagttttacaaagagccgttgccgctgtgtagagatgggacaggggaggccagggaggaggctaaagtcacaagatcttggaacaataaaaaccaagtgtcctaagtcgtttgctcgaaggcgccttcaagatttgcctgtttcagccctgtcatgagtctctgaggcccagagagggcatgtgtcttgcccaaggtcacacagtgagtcagagctctgcctggaaaaccttcgaccggagggagtgaggggtacctgaccacctgagaaggatgtatctttttaggaacaccacgtctgagatgctgtcctcggcctagctccccccagtctggaggctgtgctgtcgccccatccaggcttctgttggggtggggcagcccagagatgcctagttcctggggggtgggggcggtctgccctgtcccttccctggtccctcctacgtcctgcgggcaggtgtgcccgctctggtcccacccacaatcctccccagccacagccctctccccacactcctgccttgagcatctcccagaagcccctgctctcctgctctgccaagaatccaggtttggcagggaattggggggggactctggaatgtcgctttccggtgccagca

SEQ ID NO: 70180 - DNA, 3870 bp, Homo sapiens
cctgaattaggaaccatgtggcctgtcccactgctgctcagcaagaacctccccagcctcctccacacctgttagggcagccccagtgcctctgccagagtggctcttcattctccccagctcaccctgagaggagagcgggaaatgaccagccctgtgcacagatgagggaaactgagactcagactggcagaggggcagagggggtcagaaccagtcagcagacactgggctcagatccccccgccagtgccccaaggacacagagacaccagaccccccagtgtgccgcggcagggtccactggggctgggaggagccctcctagccccgcctggcctctggggttctgtcttctttcctgaccgtgccttgcctgtctcctgcaggctgtgctgtggcccagggcccaggacagagcagggtttgctggaccggtgacagtcgcatccttgcctgtgtctgtgagtttggcgggcctcgtctgtgtttctccttgctctcatcaggggctgggagaccggggtactgcagagagggtgccctggtcgcagataccaggggcactcaaccgagtccctgtgggtcttgggtaattaattaatcattgggccgtttaaagattaacagcaggacggtgggagaatggcttaactcatgataggggcacggaaggggagctttccctgtccctgtcgacccctggactctgtgatatgagttagggggtatggaggctggctctgcacccccaccccttccttcctgtctgcccaccatccccagcctctcctggtccccaaggaggggggttctgagctcacagtgaggggcttgaggcgtataagatggggccagaaagttccaggagcaagaaccagccgcagttgggcttccctccacaggcactggctgggctgtgtggccttaggcgagtcactgcccactctgaacctcgtttcagaggagggcactcacagcaggtggttgcagatgggaagagaggacgtccacactgtccacgagctcagcgcacagtaggtgctcaggacttcctcccagagactcgacaccccaagtcttcgcgttgtgccccctcgtgtcagagccactctcctctgagaataatagtcaagttcattctaacccccaggcaagggaaagggtccctttctccagggccaggtggggaaggtgagtcagcttcctcacctgggctgattcacacctgtgtggagtgcgggtggggaggagacagagactattcctcccttcgctctggggcagcccattccagcaggcctgagctggaagggggagggattcaagatgaaccaatacccccagaaggggtgatatggtcccgaggcccagagaggggcgaagatgcctgccctcacacagcacctcagaggcaacaccacgggcagggagccatgaccctgctcctttccccagctgctcctccactgttaggtaacagagcccagccccacctcccaccagcccacccagctgagccggccatcgcccctccctccaaaggtgcccaaggggtcagtgagcccctgtgactcagggcgggaaagacccgtgaagtcatccagcggccggggccacctcctgaggctgtcctggcctctggtctcaccggcctgggagttccccagctgtctgctcccctggctgcaggacagaggcagccgccggtgtggatggagcatgacctcagaggctcccagcccttggctcaatgccgtcggccccaactgcaggcctcagaggagcaggccccaggcccgcccagcgccttcctcgtggccccaccacggagaagagtgaaggagacacctcgaacacagtgttggcgcagggcccagggcttggctggagagggagtcagggaacactgtgatcatttgtatgatctgcggggcacccacctgagcagccaaagcttcatcactgtgctcatcagaaaggcgacaaatggtgttgcccaggacccaaggccccagacactggaggaacagggacacaggctcaaatctgaccttccccagccttgaggcttggaccccttcacgccccctctctggaccccttcacgccccctctctgggcctcagttttctcatctgtcaaaggagctggtgacagctgcctggcctggtggctgggaggacaaaatcagtgtcccagcaggaaacagacaaggggtatgcaaggaaaagatcttagagacctggctgaggggactagatccaagctgtgctaatggcaggagctatttccaacccggagccgagggctctgacagccagtgagagctggaggcagaaagagggctgagagacaggagctacagctgtaggggccggctgggatgaggagggagcaggggtcaccccacttctccccatggcccccctgtctgcagcgcctccccctggccaaccccactgcccagagagcccagttcagggcacagcccgcggggaggggcctgatgaaaatggcttcacagccacctcttactgagcacagccacggccaagcttcgtcctgggccctggggacacagtggtgcgcaagacagcccaagaccccattccacgaggagagaaagagggagagtgaaggaggtgaattgggcagcaagagatgttttaatccaaggaaaaccctacagggcgatcagagaccccttacacagacgaggccccgacggttggtggcacagggaaccgacgcctgcccccatcactcttccaaggccccacagaggttgctcaggcttgcagggggtggggacccaggaaggctcggtcagccagcgcctccctgggccattccaggctctgagctgccgtgtggcggggtgggcaggctgccagccgagggagcccaccacaggggagccgtgtgcattcccagacgggcacattcccgggcacattcctgccggggagccactctgccacccgcaccgccccgcccgctccccgcacacagtgcccattgtctgcccagacactttgagctgccgccgcccccggcctctgccacatccccacgcctccctttcccgggtggggctccacaagcccaagcacccctctcctggtccccagccctgaagggcacctgccatttttcttggaaccaaggaaggattagaggagggaagtgacttgccccaagtcacacaggccaaatccaaatccaaatccctggacccccagtgaattactcttccctaagaacccttcctcctcccaaccctacacccctgggctgcggggcaccctggctcaacagcttagaccctgcctcctgagcacctgctgtgggccaggccctgtgccggcccctacaaccctgcctccctcacggggcccagcagccctgctgggtgtgaatttccccaatatcacacaggaccaggaagctgactcagggcggggaggagtttgccaaggccacccagcgaggaagccagtgagccgagatccagcccggcccacgcgctttccacctcctgcagggaacagtacagggcagagcctgctggggtgggagggactgtgggagtgtccaggggagaaagtggtgtccaaacaaagccttgaggggaagggccctgctccacaaaggcgggctggtttgctgaagccgggtaggcctttgtttgctcattcacccagcatgtggatccaagccctagacgaggcaccgggctaggatacaggtgagatacagggtgaggagtcaggacagcctgacttcaggcagatgggtcagataatatgcactccccaggtgataaaaccagggggtcggcgggctcggtggctcacgcatttaatc

SEQ ID NO: 70181 - DNA, 495 bp, Homo sapiens
ccatttgcatgtttttaataaattataaaatccttcacacatgccgaaagaagggaacagctatctctctgcaacatgggaatttctctgcaacttgccctttttgctctgcactgagaggtccctccgtgaggggcgtctgtgactccagctccacctgcactgccacgtgacgctcccaggccgaggagacaacgctgtgcatgatggcctcagggccagtggacttttggatggtttccaggctcatgctattgatcaggtttttaaagatcaaagtgtagtggccagttgtggtggcgtccgtccgtaatcccagcactttggaaggccgaggctggagaattgcttgagcccaggagttcaaaaccagcctgggtgacatagtgaggccctgtctctacaaaataattttttttaaattagccaggcatagagctgggcacagtggctcacgcctgtaatctcagaactttgggaggctgaggcgggctg

SEQ ID NO: 70182 - DNA, 768 bp, Homo sapiens
aagactccgtctaaaaaaacaaatttgccaggcgtggtggcatgcacctgtagtcccagctacttgggaggctggggcaggaggatcacttgtgccagaaggtcgaggctgtgatgagccaggatggcatcactgcactccagcctgggcaacagaataagactccgtctcaaaaataaaaaataaaaaaaggtcaaagtctgccaactcctgaattcaaggcctcgtgtaaaacaagctcacccaaacaggggtttcataggagcggctggtaggcgcttcattcgtccctctgtcccagtctcttccacctcccagttcttcactgagcacctactgtgtgctggaccctgctggctgccaggcctgcagaggtaaccctgagacagaggctggggagggccatggtgggagggcagcagctttgcagctccagcctgttgccgccagatcaccctattgcctaaagaagctggaaatgtgagttctgcgtgaaagcaaaggtcagtaccctttaattttcttttgcaactctgaggaccaaacaaagcataactgcgagctgggctggcccttgagctgccaattgccagcccaggcagctcttttccacgcaccacaccaggattgtagacagggacaccgaggcacaggtggaagggcgactctggtggtctcgcacggctgaggcacagcagcctgggatgagctggcaggctgcagccgcctagtgaagagccttgaatgcctgttggtgcctaataaagg

SEQ ID NO: 70183 - DNA, 1869 bp, Homo sapiens
gattgctcgagcctgggaggtcaaggctgcagtgagccgtgatcgcaccaccgcactccagccctaggcgacacagtgagaccctgtctcaaaaaataaaaataaggtaactctgaaaagagttgagtacaaaccttggcacaccgtaggtgctcaacaaatgagccctctccttcacccttgaggcagcattcattggctttaccgacccctggtagcctagagtgagggtgaagagatgcctgggctcacgtcccaaccccaccaatcatacagcatccctgggcaagttattcatccacaagccccagtttcttactgtaaaatgtgatcataacagaacctgcctcaaggagtgagcctgatgactttttctctgtgtgaaatgctcagtgcctaatacagagcaagatgctcacaatgattgccgcctgctgtcccgcgcactgccttgacctgtgagtgctgctgattgtgggtgagcggctggtgaggttgggctctggatggttcctggatgctcccttcctccctcactctcaggcccgtggagttaccgcagcgcccccattatctgtggtttcactttccttagttgcagtttccagcagtcagccacagcctgaaaatattaaagagaaaatttcagaaataattcataatttgacattgcatgccattctgagcagggtgatgaaatcatgcagcgatgatcgtgactcattcctctgtccagcgtctccgcgctgcaggcgttcccgcccgtgagtcactttgtagccctcttggtgatcagagagaaaaagcctaatccacagagggttccgtactatccgcggtttcaggaatccacggggggtgtcggagggtaggggctactgtaatttcctgcctcccgtgaggtttgcatcaggcagtctcctgtcggtggcctggcccgggctcctgagactgctcctgaaagggaaagggactttgggctcctgggaactgcccaggaggcagggcagagggacccccagaagttgcagcaagtagctgcattatcagctacgaggttgagaaccaaggggaggaaggtgagctgccagctgcatggggctacatctgggtggggggacagagacagagcagcacagcccctgccagcaaggctgtcaacgaagatctaggcagagagcaatttggggtgagcccacaaggtggcggccagccactcacccctctacaccccgtggccatccccaggtgagctgagcgaagtccctggctccgtcacaccttttaaggcaaaggcagctcccgccaccacctccctgttcccacttgctcagaaattcccagcaggtattttttctttttttcaggaggaatggaatgggacttcttgttctgtcaccgcaggattccggcgaggcctgtctaggggttctggtgagagaaaagcgtgacaggaagcgcatgccagcaggcacttggagatgtacccttggtgacatgcacaggcacggcagccgccccacccaccacaggcctccgctcgggacagcggggcacacgcacaatacagacgaggcccagagatgcagagacccccaacaaaccttctccatgctagggagacaggagatccagctgggaatgagcccatatcatgaagcccctccctcaggagctcataccggagcccaggagccttgtcccaccccagggccttcgcactcaccattccctggcgggagtgagtgttccagcacagggctccacaggcaggacccttgatacctttcaaatctcagagaggcctccccgaccccacccacatgactccatcccagtgacctgttttatttcctcacagccgtcttc

SEQ ID NO: 70184 - DNA, 1050 bp, Homo sapiens
cagtcaagccaggctgcccgtgagaaaggctttctgtgcacttgggcacatgtggataggtacgggtgtgatgccagcctccacttgcagcctgcaggtgtgtctgtggtactgggtgcctatgtgtgtgtcctgagcctgggggaagacagacagactacccctaggggcctttgttctttgcgtcctgtcatcctggccatacccagaactcggtacagagccctggacaagcagccaggctcggccaggacatctcagaccagcaaaccctttcctttctgggctggtaggcagcggggctccaggcccagcctaagggatggggaagggaggggacaggctgggacccctgcccagtcagcatccccaccaggacgagatctaaccatggagactgacaagaggcagcacccaggagaccaggcaaccaggtctcacacctggccctgccactaaggtgcctggtggccttgggacaataggtcatgacccattccagctgtgcacttgactcccatgactgcggggcatccgaagaccctgatgcagaaaggaaccctgcccaatccaaaacccctagcagggccctcttgcagggcacgtgccgcactcaccccctggtggctccaacctgaagtgcagctccagtcacctaggcccaggctgcagagccaaagatgggaggggctgcaggaaggagggttctgccttgagaccaactgccccaagccaagctcagaaggagctggagacttgcagggtggacagacacacgtggggaaggttcccgctgcacacaactcaactctgacctgcccctgcctcaggacctacatggcacttatccgctctgcacctggatgactttttttttttgagacggagtctcgctctgtcatccaggctggagtgcagtggcgccatctcggctcactgcaagctccgcctcctggattcacgccattctcctgcctcagcctcccaagtagctgggactacaggcgcctgccaccacgccaggctaatttttttgtattttcagtagag

SEQ ID NO: 70185 - DNA, 610 bp, Homo sapiens
gctttcactcaaggacagcctggcaatgtcctgacaaaatttcaacggtggacatgcactctcatccgtggtggccctcaccacatggggttgcactcagcacttgagatcagccaggataaccagtaacaggacagcaagaggcacccactctaaccaagtcaataaaaagcctgctcagctcatcaactaggtttccaggagagcagccagtacctcacaaccgactttcaggcaggcatttcagtgttactggtgagtcaccagttgaattttaaaggggaatggttcccttgctaagggccagtaaggacacagtgccctctgctggcaagggagaagcctacccataagcgtgcgggcacgggacccccatgatcacataggtcacttctactaagtggcaggccaagccaccccggggcactgggctcacctgggtgtgggcaatgacacggatgacttggcagtacttcttcatgctgctgaagtccttctccagctgcttcttgccatcctcatcctgccatttcttgcagtacttggtaaaggccttcttcttagatttatgccttcaggagcagagcagagttggggaggggaccaggtg

SEQ ID NO: 70186 - DNA, 3357 bp, Homo sapiens
tgctctccagctcccaagctcccaagctagggactgcatggcctcctcccttaccaattcttatagaaacgcctcttgcattcatcactgatgtgctcagcaaagacagtcttgaaggtccggaggcctcgaggggtttccacgtagcccacaatgcccacaaccaccatgggtggtgtctctacaatggtcacagcctccaccacctccttcttgttcacctctgcaaaaaaaaagcagtagtcagacttggcaggagcccaagcaaggggtgtaatgttttctaggaaaatgcaaagtgcccatttaggccggaagggcaactgggccccacacctgcagtacggactcacagggctgtccttactgcctatctctcattcaaagcacatttatgttattcaaacaaaaaatatcaggaccctagacagccaaatacctgtccagcttcaattctcttctacagaaacctctggaggcagacaagattgctatttatctggaaaattcagtgccctaacaatagctctgagctcagagattagtcagtatcaactgcctaacattaatgtctccatggctcagcaaccagtgctgttagacatctctaagtagaacacacacaggtaagtggccattattcaagctttcaggtgaaaaaaacatgaatgaggcagttcttatgccagcctcagcagctccaaccccccacactagtgttaacttctctttgctaaggttcctggcaaatttactatgctctgaaatcaataccccacaccgcacctaaagcaaacagtgctgaccatctgtagccttggaatattagttttcaagttaagcattcccattctgctgtcgcagcagttctgacaacgtgtaactcctgcttaaaaaaaaaagtctgccctctgctaacagcttgactccatctctacaatttccctccccctccactcctattcccccaacttttaggatgtctgtacatactggatcccggcctgtcgacttcccgcacgatgtgagtcatgccagccttgtatcccaggaaggctgtgaggtggaccggcttggacgggtcatccttagggaagctcttcaccttcccacgatgcctgctgctgcgcttccgaggcaggaagccgagggacccatgtctgggagcggagaactttctgtgagactaggtgggaaaaaaatcaccgtcagcacccaaaccaaagcagtgcccccttctctagttcccagctgcttaagttccaaatctcagcaatactgaagaatcctgaccagacacccagcaagccgaataaaaaggtcattatctcttccaggctcgcacgtgtcaagaatgcttttgtattcgacaaaatttaagctgaatcttatttcaaatcctctcaacctgtaagaaaacgacccattttttttatctaaccacacaaaaatacactaagtagtggcactaaaaactgcttaacaggcagctttatatgccaattagcaaggttttgaccgctaaagaaagggactcccgggacaaacgctgggtagcagctagcaatgttaagctataggctgcctccggtgcccggacactaattacactgatacacacaggccaaagaactccgcagagccaaatcagaacgtgacaatcagcacacagtttctgtccgcccgtcaataagttcatcatctgtggtttctgcgagctccagaggccttcggagtgcaccagcggccccagatattcaggaggactccacaacactcccctcccccaagcttctttacctcccaatgagaacggcgccgagaacctccacccaaggtccttctacccagacaagcaggttatgggccctaatcccaactaatgatagaattggtgaggtcgaaacttagaaatgactcatggctttaaaaacgccgggcctccaagcctgctcccacccttacggcctctctctggccgacctgcaggcccaaagccagtcctccaagcgctcttcacaagcctctcgactttccagaaaataggccagactgaagtccccgctgggtcgcccgtgcccctaaagcaaacccccggcgccggccaagacgggatggcggcgatgcgtcgcggattcagccgtgccgacgccggtgacaatgaaacggccgccattacaacacataccatcacgccatcaaatcccgccggtagaggccggtcggccttacgggtccgctatataaagccaaatctggccccgccccttccggcgtgcgagcgcgcccccgcggcagacgacaggtcgggggcacgtaccgagcgccatttccacgcacgctcttccgctcctagctttcgttcagaagttgacgtcagcttcggagacagaaattacacactctacggcgaggggtcgggttcaaacttagtgaaaagccgcggagaggtgggctaagggtgggtgagccacaaatctacggcgtccggcagcagccaaatttgataataacgaagaaaaatggctgcgtcgcttctcctcctgtgatatgcagctatctctggaattagcgaagaaagactgaaactctcgtttcctggctcccacgctggttttgcggcgacaccaatttacctttaatacctttaatctcgggcatccctccctcaagccctatctctgccatttctcccatgctaatgcagtggcccgcgcttgattctgagggtcaggagcgtcccaagcctgcggaacggcctcacgacctctggtcatgccgagtccagctgctcagcctcccggagccccacgccttccagacctatgcatcagcgagggctttcgctgatctctgcctaggctccagggtgactcggatcctgaccgattccctgcttccaggctggtcccttacaaatctcttttttgagacggagtctcgctctgtcgcagtggcgcgatctcagctcactgcaagctccgcctaccggttcccagttcaagcagttctcctgcctcagcctcccgagtagctgggattacaggaatgcgccaccatgcctggctaattttttttttttttttttttgtatttttagtggagacggtgtttcaccatgttggccaggctggtcttgaactcctgatctcgtgatccgcccgcctcggcctcccaaagtgctgggattacaggtgtgagccaccgcgcctggccccctacaaatctttctaagaatcaagtatctcgttactttccatggccgcctcgttgtttcctcggaattaagcatcaacttcagcggccaccaaagacgctcccctaaccgtctacttcagcctcatggctgcgccagag

SEQ ID NO: 70187 - DNA, 1486 bp, Homo sapiens
aatgaaatgaaataaaataaaataaaatgttagctttttgaaggcctgtcctgctcgctgcagaacccactatagagccaagcagggtcacctaggtagcatttgctgagtgaatgaattgtcctccccttaccaactgtgttcacaaagaaccctcaggagttcaagaccagcctggccaacatggcgaaaccccgtttctactaaaaatacaaaaattagccgggcgtggtggctcatgcctgtagtcccggctactccggaggctggggcaggagaggcgggcacctgtaatcccagctactcgggaagctgaggaaggagaatcgcttgaggccggaaggcagaggttgcagggagctgtgatcgcgccactgcactccagcctgggtgacagagtgagaccctatctcaaaaaataataaagatgggcgaggagcaatcggccccgaggaaaagacaaaacaaaacaacaacaacaacaacaacaacaaaacgtgcaagagcgcgcctgcgcacacggtccgctacgacccccatccctcttcgggcgtggggtggcgctgggcgcatgctccccggcagcgcggtcatcctcgcctccttcgggccgctctagccgccccactcgctgctctgcggggaggcgggcgctcccgcaggggttcctccaagatggcggcgcagaggaggagcttgctgcagagtgtgaggaacaggcccgctctctgggcttggggttgggagcctgggcgggggtgctgtcgggtgcaggaacggctccttctccgagtttggacagccaccctctccgtggtggggtgtgtcagccaccttctcctctcctcgggctggccccctcgttcccgaggccagggcgtgtgtgcgcggcgggcccggcccccgggtcaagggcgccggggctgtgggctgctgctgccgggcgtcgagggcgggagcgtcctggagccagaagggaacacggcgggcggcagcagagctatccgagtctcgagcccactgcgacaccgagcagacgtgcaatgataataacagcagcatccacagtgtaccgcttactgcatccccggcgttgtgttaattgctttacatttgtcagtttcattttcgtagcagccccctgagataggtgctactgttattcctatttgacagactgagacactgaggtggtcgtttgcctaaggccacacaaatggtacgtattgaggcaggattaaaatcaggcagtgtgattccagaaacccccttaacccctgggctgtactaaaggaatgaccagtggtagctgtcactgggttctggtcctggctctgactgtgtctccctcagcctcagtttccttctcctaaggcgagagcgctgagtggaagaattgtcttcagactcatccctacccccggtctggaccctcatgggtttggcgctgtcttccaggccctgcgtcctctgacgcgtatgtgca

SEQ ID NO: 70188 - DNA, 2170 bp, Homo sapiens
gccccaggccctgggcttggcagagccaggcatggagggaggcagttgggggagggagcttccatagagacacggcctccgtcctcaaatctagtgagagacagagaagcaaatggataaattacagtgcctggcatatggtaggcgccaagaaatacgttttgttgttgaacagattatgaggcgtaagatgtgcagacatttccgtggggcccaaagaaggcacgtgagtgtgttagagggaggcgaggaaggggctgggagagatttcccagtgaaggggggcatttgaggtagactttgaaggaagggtaggagtttgccagaagccatggggcctggggagtaggaacagcatggagggatgaaaagaaggcgatctgagaaaatgggttttgaggagctctgaatattagtgttagaattccctcaggtaccccagggccccagccagagatcagcatatacagtacaggaggctggccaggtaccccgacaggctaaggggttgccagcaggtgaggggcctacccggtgcggcagccttgttggacagcgaggctacctcctgccctctgaacttctgccagcatcgggaccaccccggtacccacagccggacccggacaccggagtcctctgggggcggggcgcgagtggcctctgcaggccagtcccttggtgaggtcacacacggaggcggggctcaggattggggggcggaatcatgcgcagggggcggggcccgagagagagcttggagaagaccggaagtccctccgcctccactcgccctcgtgctcccttcagccccttcgcagctccgtgcgcaaggtcgtgtcccggaagtgaaggggccatgttgatgggtgacccggggagaggtacccggccagaggcgagtcctgcggagtggtagcgcgcacggcctgcgggtgagtgagagaaggaatgagggccgccggcggctgggcggcggggaggttgcagcgcctcctctcaggctgctgccggcgcctcgcatgcggcccggagtcaggataccagcatgcagccgggggtctcgccccatcccgccctggactttcccctgggagacccctcggctgccccgccccgccccaacctcggagacctccagtgccccgaagcaggcctgccctggcctctgggcctccgcaccccggcccggcccccacggttggtgaagtgcagactggctggggctcagccgcccagtcgcccagcgaccttgtagttacagccctcgccgtgacagtcgccttttacagcatcaaacacttctgttgattttctgcatcgggaggtccttagggccgagggatctcttaaacagttgaggaaaaatgggcagggatggtggcttgctcaagcttgcgcaggaagttagcaaggccggaggctaagggctcgcggactttgggcccaaagtccaatctttttttccagccaaatacttcccccacttggtgtcatttctttatttctgaaacggaggtgatcatttcttccacatagggacgttgtgaaattctctccgttacgcataattttgagccccttgtatgtgccaagcgctgtgctgggaaagttcgtggagcacccagaagtgctgtacacacggtccggctccagcaaagggtaactcattccagaggcaggcagagttggggtcaggagtgcagccctccccttgacagctgtgggcccgcgggcaagttacttccctctgggagattgtttcctccacttaaaatggggtaatgttgacccctagggtagctgacagaatgagttgttatgtgagacatgcttcgaacattgcacgttgtatatagtgcaatataatgcaataagcatttactgttactaagaaccctgaccaccttctagattcttaatttaaatgtggtcatgggcaacaaagcactttacagatatgcttgtgtaagggtttattgttactgaaggaaggcagtggcagtttatacttaaatgtaattatttattgagcatttacaaacctggctaggtgctactaataatatctgctgttgatagagtgcttcgtgtgtgccaagtgctgttctaaacatattcacatacattaaactcatttagtgcttatgccaaccgtatgggcaaaata

SEQ ID NO: 70189 - DNA, 3040 bp, Homo sapiens
ggatgtgatggagagtggcagaagtcagggtcaggagacctgagttctatgaacagtggcagcaacagcaaccattattgggcgcttacatgtaccaggcaggcactgtgctaagtgctttacatgtatgatctcacttcatgaggcaaggatactcatcagtagtctcattttacaaatgaggaaactgaggctcagagagtataagtcatttagccaaaatgtcccagccaggattcttttggatgcgctccccaaaatctgtcttctaactcctaccccatactccctccactgggagccttgtgactttgagcaagaagcttcatcccattgggcctcggtttaccattggaaaggatttgtgggcgaggttgaatgagcgcagcagatggcctgtggttatttagagcagtgcttccctggttgtttgatatcacagcgctcatacttgtgtggcccagtgaaatggaggcggaaactcaaagtttccaccttcacagggcctgactggaaggggctgaaggatgatggggaggtttcttgtattcttaaaacagactaccccttcccaacgcacaacccccagtaagtggccgtgggttcccaagcgcctctcctccctgggccatgggcgtgactgctgaaaagcgggttaggccggggagttcagaatccggagtgaatccgaactaccccagggagacggcagcgaagaaaatcttgttcttaggagaacgcaatcttcggacaccagaagttcctctatgatgctattctgtggcagccttgcacttgagccggatgaaaattgtaaaaacccaggttgggcgacaggacggcgcgtcttcccggctcctttccagagtttaggaggagccatgcagactcagccggcctttgggggtaggtggacaggcccggcgcgccctctcgaggccccttcaacctcccgggggcagcagcgccgtgtcggctatgaatggggcctctggaaaactcaggcttggaacaggtaaccccccggtttccgcaggccacaaatcaccacccgcaaccgaaggacgcgcaggctgggagcggcggcggggccaccagtgcggacctccactgagggcggcgggatccgaccgcaagggctggtccctgaggccactaaggggtgcgctgggctaaggccgcctgggggcaggagccagcgcgatcgtggcgggccagcaggcggggctggctgaggactagcagcgacccgagaccccaacccttcccacgcggaccccgggatccctctcccagcagccgcccatctagggccctgagccaataagagctcgagatatatatgattcaccgggcctgggccaatcaccttgacgcgcgctcttcgccagcacctcgcgcgataacctggcgtcctcggccttcacaataaaaactcttcgccggaaaacgacctttccccgcccactgcgctgacaccggaagcgaggcgtgtctgggagatcactccgcgctccggcggcgaaggaaagaacggactctgatcatagaagcctagtaaagtagtacacctctctcctttcgtgaggccataagaacaaactccttttctcgtcacagctacgccctgggcataaacggttggggcgtcaaagggagggagggaagggagcgggcgggaggagacggtcacgtggtcgcggcggaaggatgcgtctgtgctgcgtccccatagagacgaagtctataaagggccggcgggcggccacggcagccatttctactttgcccgcccacagatgtagttttctctgcgcgtgtgcgttttccctcctccccgccctcagggtccacggccaccatggcgtattaggggcagcagtgcctgcggcagcattggcctttgcagcggcggcagcagcaccaggctctgcagcggcaacccccagcggcttaagccatggcgtgagtaccggggcgggtcgtccagctgtgctcctggggccggcgcgggttttggattggtggggtgcggcctggggccagggcggtgccgccaagggggaagcgatttaacgagcgcccgggacgcgtggtctttgcttgggtgtccccgagacgctcgcgtgcctgggatcgggaaagcgtagtcgggtgcccggactgcttccccaggagccctacagccctcggaccccgagccccgcaagggtcccaggggtcttggctgttgccccacgaaacgtggcaggaaccaagatggcggcggcagggcggcggcgcgggcgtgagtcaagggcgggcggtgggcggggcgcggccgccctggccgtatttggacgtggggacggagcgctttcctcttggcggccggtggaagaatcccctggtctccgtgagcgtccattttgtggaacctgagttgcaagcagggaggggcaaatacaactgccctgttcccgattctctagatggccgatctagagaagtcccgcctcataagtggaaggatgaaattctcagaacagctaacctctaatgggagttggcttctgattctcattcaggcttctcacggcattcagcagcagcgttgctgtaaccgacaaagacaccttcgaattaagcacattcctcgattccagcaaagcaccgcaacatgaccgaaatgagcttcctgagcagcgaggtgttggtgggggacttgatgtcccccttcgaccagtcgggtttgggggctgaagaaagcctaggtctcttagatgattacctggaggtggccaagcacttcaaacctcatgggttctccagcgacaaggctaaggcgggctcctccgaatggctggctgtggatgggttggtcagtccctccaacaacagcaagggtgagtgggccaccaccacatcgtcctggtgggatctagggttaggggcctcctacctttgtatctgactcacttggccccatcactcaaatgttttgcagaggatgccttctccgggacagattggatgttggagaaaatggatttgaaggagt

SEQ ID NO: 70190 - DNA, 1081 bp, Homo sapiens
cttgtacatagagtgctgtagctgtgtgttccaataaattattttgtagggaaagtacttgtgcgtttgaattcctttcctggcaaagtaaccgagtgaagcgccacccacccaccccaagctggtcttaacatttcctgtgagatctgggggaggaggcagtccaaggctgaagatcggttcccagagtgggatttgctcatccctgctcggtgtaggccacgatggctgattcatggggccctggagccgtatagttggccatttatagtaagctgggtcctttgcccagagctgagtgctggttgtgtagggggaggaggctggagatctctgggagattcagagggagggacagcctgggcctccacctgtttattcaagagggcttcatgccaacagctgtcgcataaaaccctgaataaggttgcacggtctttgagatagcacacaagattaggtttcacttgttacctgaacagttctgcagaagcctcatcctgaagaaagaaatggctccttttgggaattgatgctgaaacaggacaggagctgagggttggcctccgtttctccttacggggtggaaggatgacagcctgcgcaggttctggctagagctgggcacaaaggcaggcaacagttcctgtgaaggctgttgtgcctgctgctatctaaactaggaggcctgacggcctcgggacatgttaggatggatcagtgcttagaagccacacctcactgcagcttcggacttctggcggggcgacttcgcctttccaggcaggcgatgtcttttgtcctgtgttgcggatgaatgcttgaatgcaaagatcagcgcagcccgggtaggtctgcccttcctcttgtgtccttcgggattagcctcgttttccgtctgtggaaggtggtgtagaccgggtgtgcctggggaatggctgggaggagagtgagagtgagtgcagcccaggcactgctgtaactgagcacagcacatgtgttctttcacccagtccccgcagcacacccgtgaggcagacgccacacccaggaggaattttttttttttgagatggagtct

SEQ ID NO: 70191 - DNA, 645 bp, Homo sapiens
acagctcttgggttcacatttattgtaacttggaagcccacccttcttcctactcctggagctgtcgtccccaagggctcaggaattagccttgctccacagcaaacagcccagaggccccacctgggcaaaagcaaacaaaacagatacgttcctttccggcaggtgcagatgctctgcccaggcctgcggaagccagctccggtctgtgtgtaaatcctccccaggacttccggcccaccagctccattccagcctccactcggctcagctccgcggcttcctcgagccaggctggtcctgcatcgccatctgctggccgcgcggcacggccggttcctggagccagcaggagtcggaggctgcagggcttgaaggcctcttcaccgtgccctccagggagcctagctgccgaagtattcctgctggaacttctggaagtcttcctcggtgaacacggtgccctcagccttcttcttcttggtcttggccacaggccggtcacaggccttgcggccccggttctggcgcaaaatctggcgagggtgcgggaccgagggcccatcatttcaagagcagaggaggcccgcaaaggtcacaggggagttcggcgcagggcagggctggcccagcctcccaccctat

SEQ ID NO: 70192 - DNA, 1595 bp, Homo sapiens
tgcctttttctgaatctgtaaaacgggggtgatagtagtatcgacctcaaagggctgctgtaaggatcaaacgagcttacatttgtacagcacttagaatcagcacctggtacagagtgttagtgaatgtgtttaaatgctccatctttgatcctcattcactaggtcacctttaccagcctttattttttcaaattctcaaaggcaacaacctcctttctgactcaggacctttgcacatactattcttcctagaatattctcctacttttcacctagctcactcttatacatccttcagctctcggctgaaatgtcgcttcctcagagaaggctgacttggcctaagtccccatcagagtaccgtagtcttttaattcataggcttcaatgcacttagcaatgacacactgggtttgatattctttgatgcttctctccccactagggccgtagtccacgaggaccaggacggtggcgtgttctgtcaccttcgtatgtccagggccccgctccgcgcctggcacacagtaggtctagcaataccgggcgaacgcttcaagccctgcctcaagcgccacctcctctggggcgcaggtcccagcaccggaggcagcactttcagccccttcccgaacttacccagtgccgacttgggcacctttcccttggccgagttccgcagtttctgggcctgaattgccttcgtcttccggggccgtttcaccggagcccctctcggcttggcctgacctggagggtcccggggggctgtaggggaagagagaggaagagacccaggtcagagggcgcgcagcgttcccatgccactggggctaagcccggcctggattgttttccatccagggctcccgcccgcagccactaccatcctcctgcccgcgccggacgtcccctggccagccctcctcaccctcggacgccgccagcagctccaggccccgccgcagcagggcggcggacatggcggcgcttggctccgcccacgagcctcacactacttccgacctggcagtccctgtcgtctcggcggaaacccgagcccgaacagagggatccggagggggatgggcggaagtgcccatctttcttaggacgcatgcgttaggggtttacacttgagcggaagaaggggcggaaactggaggcgggtccaaggcgcagaaagacacatgtgttactcaatcccaatctacctggctcctggcgctcagtcccctccttccccggaagccgtccgcaacctgctccgccgggttggccaatcctctcgggtctcgtggctccgtggcgggctaggatggggacagggcggagtgtttttcatatacttcaaccagcactaggtatcgcacaggttgagtgcagcatgagaatccagttgtcttcccttaagccagacattaaagacatatctttgttttgaaaactacaattatttctcataaaatacgttgtttatgttaccaagcaatgggtttattgtcattttaagtgaattaatgaatatgtaaaatttttgttttagtttctagtatggcaaatatcagttgcctacatacaaaagttctttg

SEQ ID NO: 70193 - DNA, 606 bp, Homo sapiens
acacacacacactgtctcacacacacacacacacttaaactcacacacacacacacttcccctgaggacccagtaaacaattgcttcattttcctatcagcacaattccaaatctattcatgccccttagcccatctggctgtcagatccacaagagaaaaaggcttaatacccacaacagagccttgtttattacttatttatctccctccacccttgttcccgatgggatttcaggcggcttactgagatggacaatacggccagataacatcattcctgaattccttagcagggcacacaaagtcctttgtgagctgccagaatctatttccccagcctcgtccctgctgcctccctgccaactccccgtgcaaacacacattccagcaaccccccacgctgccttagttacccgaatggtccattgcgtttcctctcatgcctttgtggcgttttatatgctgatctctctgcctgatgagcccctccctgggcagtcctacccctctaagctggagttcaagcatgacctcctctgtgaagccttccttgatttcccgggcagatacagacatttcttctctctgctcacttaccacttaa

SEQ ID NO: 70194 - DNA, 813 bp, Homo sapiens
accagggcagccagctatcatgtctgattcctctgtgttattctcagaggcaagcgtgttatctatctgtgttattatcagagtcaagtgtgttatctagtactgcttatctattaactgcctccaactgttggttgaataagtaagtcattggtacataaaggtgaatatcacaaaacaagcacaatatttcatattagttagatctaggaaagaccttttccaatgtgaactgttactaaaatattctgttctgcttctaaccttctgtccaactgcaaatcacatcacataatatttgtggtctttgagagcaaaaaccatgccttaatcattctgtttcaatgtgagctccgggtgggcaaggacttggttttgctcagagcctgcacttggaaacgggccttgcgcttggtaagactccatgagtatttggtaaataaacaaatggtttctaacccttaacacagagctacgcattcagcaaatgttggttggattaattattaaacaagggggatactttttctttctaatatctctttctaacattcccgactgaggcggcgtagcagaatggttaggtaggcgggctctggaatcagatggtctgggtttgaattctgcctattctacttactggctgggtgacctagagtagctactgaacctctctgtgcttcaggtttctcacttgtgaaatgaggataacattttttctcctttttttttctgttgcccagactggagtgcaatggtgcaatcatagctcactgcagcctcaaagtcctgggctcaagtgatcctcctacc

SEQ ID NO: 70195 - DNA, 479 bp, Homo sapiens
tgatttaggtagttggggtgatctagatagttggctacattggctaccagaaggaagggttaactttccactgcgcacatttctaccctccctctctataattcctccctgtctgactgagttttctttgtatattgtgttctgcagaagaaaaaggcaagattggacacagaagagggaaaaaggatgtaggcggcaatacaggctgcagctggggttaggggtcaagtctcatgatgtcatactaacaaagcctctatttatttagcatttaatatgtgccatccactgtgttaatgactcacctgcattttctcattagcttttcacaacaaccgggtgaatatgtgttttccttatttttggagaaaaagacatcaggattcagaagtttcttgccagagtttccatagctagtaagtggctgagccaggacccaaactccaaagcccttgctcttaaccactgtgctacactgc

SEQ ID NO: 70196 - DNA, 1431 bp, Homo sapiens
gttgctgatgcatgggctgctcaggtcatcgtaactgccccggagtggacttacagcaagaccatgtgtagactgggaaactcttggttcttatttgcaaagccagagtaaggggaccaatctggataggctggcaacttggaaggattgtgcatccgtttgaccactggacaaatatttagaggtttactgcatgtgctaagcatactttagtggaaagcagatacctaaaacacacctctgctcttaaatagcctaatcttctgctgatccatcatctaatacagtctgaggagtgctggacagagggcgtggcgggaggggcactagcccagcccctaaaccgggttagggaaggccctttgatgccgaggacctgtctacaggcatgtcggaacacagcaggaagctgagatggcacgaagctgtccacccatcttgcgcccaggctcccttgtgaccagcggcatccaattttgaggctgctgggcggatttagagaacgttgccttgtgctttgggaacagaggcaagtttaccacatccgcttctcaaagattgacccttgacccccgcattcctggctcacacccagatgaaccattgacccagctaaccagctcatcttggtttatcacaaactgtccaatctcctccgcacctcaatagctgcgtaaggcagggtcttgtcttcattacacagaggctccctctgagctccaaaagggtgaaatgacttatcttcagaccaggacaaggaggttacacaacatccccaggtccttggttgggattaccagtgacgccagtgaccccatgtggattgtaaacacaacgtaggagagggaggctgctggagtaggtaaccatgactaactaggagctgcttctatttttattcctgttgtagttagtggaaaaggcctgcctgaatggttgaggaaggagggtaaccagccaggctggtccctaacccacctctgcctgtcgatgggtttgtcccttttccttcaaggcctggctaagaggccacctctgccttggcattttgtcaatttaattttcaatccagaaggtccacacagtttgctttgggagagtgcatttgaccctcctggattgggaactttggaaaagagagactggcttactctctcagtttcctttccggtacccgaacagtgctctgactgtcacaggtgatcaattatctgtttatagaattgaaaactgtcttctattggccgcctgtccctctggggaagcaagtgtctggagatgtccccatggaattgcacattccctggggaactcctttaatctacatcgtaacaagctggctggcagcagagagaagaatgctctaaattggggatatggggtgcagggagggaggtgcatcaggggatttagggaaaggctccagagcag

SEQ ID NO: 70197 - DNA, 3145 bp, Homo sapiens
ttagaatttgacgcacgatctttcttctgtccttcttgcagttgccctaggaatacatgccacttactcttaattgacgtttatgaaataccttggcttcatttgctgaaaggctctaagtgttgagcattgttactatgttacaatggttgttttattattaaagcagtgccaaggaggttacacaacagcttggatcaggaagtgaaacaagggcggtgatcccactgaagctacaggggatggggatttgggacggtaaaatgttaattacccaagatggaatgtgggctagagtccagcgttgtgctcctggagatcatttcggtcgcaaaagctcactggcaatgggtcctaagcgtcctgccctcctctggctgaaatgttggattcacttcgatgaatgctgctatagggaaagaacccagtggccaccagccaggagcacacgtcttgctcagcatcaactatcctggaagatttccaggagctgaagggctgttctctttgcatgcaataaattattcatttctaagacgatttattctgtctctctctttagacttgatttctcctagttttccagctcttgaggactctctccaaagaatgagttgtagatggttggtcaggggttgcgagtggtgcctaggcttcgcataaaaggaggcagaaatgtctaccttaaaggggagaggaatgggtcctggggaggaagatgtggtggaggcaatgacaacctttccatagtaagtccccaacaaagtcacttctagaaactgactgaagactttgagttccaaatgaaacgtttttaagatgctaggttggctgacaagtacatcgtctaaggtggaggcactaaagcataataaaaagagtgaagtctctgcagtttgacccaggaccagatgccaggcccaccaacgactctgtatctggatgaccttgggcaagttttctaagctctcgccagccttaatttcccatctataaaaactggatactgcattactcccaggtttaaccagataatgtttgtgaagaaagcagcccaatacttggcacaaaataggcaagggagtcactattatcgtcaactactggccaaacaaccagagttgaccccaaatccccagtaaacaattaaccgtagcagagcgaatccggatctgacgcacctatttgcccaataaggtgccaggaaataacacagtggagtcaaaccaatggtattagcccttgttgatggacgggctttcttgctgttccaccaatagcttgaagatttgactggggagtgacatcctgacagtccaatgacgcacaaccagcccacactcagcacttcggaggggataaatcaaggagccggcacgtatggattccgttatagggcagtactggttggagagaggagcttagggaaacagcgccgaggcaaggcactaatgagctaaaaataaagaaaaaagacgatggttgcgccaagcgacctcggccgccatcatgctctaatttcccctgagtctctctgggtcctcgaccgaggaagcggcctctgggatgctgagggggtgtgtccccacatgattggctcaggcagctcagccaatcctagctcgttaaacgggaagcacttaaccaatgaggggcgaaggcagcaacgaggaattggaggggcggaacgacagcttgacgggcacaaaagccagccagtgagagccggaagcatcctccctgcggccaatggagtggggctctgggcgggcccccgagtgtttgtgttgtggttttgggggagggatgcggaggggaaagtttgtttattttgtttttagtttttggggtccccgtgctgctgcaaggcgaaacgggagggagtgacccctgcgcccctcagtcccccctacgacgtcgcctccatagtctgcggagaagcggagactgcgcgcctcgcctcacagcgaaacgccgcgcactcggagccggcacggctcggcggtgagtgaggtgcggcggccgcgccgtccttcccctcccccgcgccccgccgggacggagcggggcggccgggggtcggcgagggcgcccccgggggcgcgcggcgcggcccggggcggtgagcggaggcgcggcgtgtgcgtgtcctcgcgagggagcgcgcgtggggcggggagcgggccggggagggggcgtgagcgcgcgcggggctggtgcggccggcggcgctgagcgcgcgctccgcgggagcgggcgccgccgagatttgagtcgaggggcggggagggactcggggcgacgtccggcgcgcgggccggggcgccccgaacggccgggcaggcactggcgggcgcgcgcgcggctccgggcgtcacgcgccagcaggtgtgagctgggggagggcttccgggtgggctggcccggccgtcgagttcgcttcccgtctccggggggcctcggcgcggggacaccttcccggcccgcggaggcgcgtccgcccctggctggcggtggcagagggaggcgtcaggcctcggatcctcgggtccctgcgcagcgtcccggcctgtgtgcaggacctgcgtgacaaggtgaatgcgttccacacccctcgccagggccctgcgtgtgcggccacttggggaggcggctcagactctggacaaggaaacgaggggcacggagagtgtttttacaccttcccgtggtccggtgcccttcagttccagactaccggtttattcggctgtagaggctggacatccgatccagcgagacacgctgtagtggttaaagacgtccagtaacggtcacctctagtcaagcgccttaaggaccagcttattctgaattctttggaattcaggttaccagcctgggactttaagttcgtgctttctcatgtgttttggctgttttattactttttagcatcagtgctagagattgaacgagaggatggtgaatttcaagttggtcatttgtattataatttaagcaaaattatacaaaattggtcaaagatatttcttcatagtgaataaaacaagccaagaatcagtgaatgaaacattagtgcccccaccaacagttaagtatatatataaagtgtgtagaaatgatagacattagcattttgtga

SEQ ID NO: 70198 - DNA, 1369 bp, Homo sapiens
tttcatgtagtcatgtttgtcaggtttttaatactaggtactttttgtatcctatttaagaaatccttccctacccctaggctatgaagcattttcccatattatcttctaaaagctttattatttatctttcacatttgagtatacagttcacctggaatttgatttttgtgtatggcaattcttagctaacttattagtactcctctgcctttaaaaatttttaaatattctatccagactttctggctgtcctcagcagaatggttggtcttcattacctggtttaccattcccagaagcagaaatgtcttttaaagtttcagtttcactttgacttaaaaatgatctgtcccgtcttgttaaggggccttaatgaatatgtttactaaaaaataaaaaaagactgaaaaactatatagattcatgactgtttctattttttatttttattttaagagaccaaaaagaagcttctgtttcctctctgcttctgtcagctataaaatactgttagacaaatttaagctcgctacataaaatgaacatggttatacttattgcaggataatttcagaacattaatcacaggaaaaaattaaattaaaaaatacacactatccaacattgactttgataataaaatggctttaactaaggcagtggctacccccctttctctgtttatccataaatttaaacctcttttttggccagagatggactgtatgcaaaccgcatccagaatgcttttagtttgtgccacaaaatatgaagaaaatgttttcagtttatggcaactagatccatgacatatgatgctccaggaactgtttttacagtgcgcaagatgcacaggaacagaatagcaaactcacatgattgttggcaaggaaaacctggctacgtggctgatgttaaatttgctttttaagacagccagatcaagaaatgtctgaagactttgagactgcagcagggagatgattttgcagttagtaaacacagccctgggaagccatggcaaggcagttctggtaagccatttacagcttctcttctagcaggagagcacagtggaggctctggagaggaaaacctgacgtggcctctagagaatgttgcccagggcagtagagcctccctggtggcactgctgtcagcaccaccctgcacagcccggcagaaccctgccttgccctggccatctctgtctctgagattcaccacggaggttagcttggttataggtgagctgttaagagtaggggtttgtgttcttggaagttagggcttaggagccacacatttccttcttgcccagctcttgcttgcttagaccattttctttatctttttcaatgaacac

SEQ ID NO: 70199 - DNA, 896 bp, Homo sapiens
gagttatgtgttttgccgatcaacatgtttccttttttctgcagatctaatcactcaaggagaagtttgaaaaccattggcccaggcttctgttctgtgcaccacagtgaaacggccctgtggttctgcacagggcaggtgtgggttcttggagtgagtcgcattgtagttactgactgctgctgacctgtggtgcttgcctttgcaggtggaacaggaggattttgtaatggaagggcatggcaagactccacctcctggtgaagaaagcaaacagtgagtcacagtttatttaaaaagagtcctattacagatcctcggaaacactttggttcaacatgctgataagcgtgtttgtcagagatgtatacgttggagacattggggaactcaccagttgctttggtggctgttaatgcattgcttctatttatagaccaactaactagaaggacaagaaagttagcgttacagtttttcacactcgcctaatcaaaatttatgttatgttgtagcaaaggctttaaggctcagtatgttccaaattgaactaattctgtttggttgatttccaaagaaagtataaaatggtacatccttttctcagtattgtctttctgaagtgaactaaactaatagaccatttccctgcaatctaagtgtgaatttatttgaatggtactttctgaaattctattccatttggttatttacactgctgatctttgtttaaataacaaattgtttctctaaaggaacaggaattataaataatataacttagccaacattccaaataattcaggatctctcccctaactccttaaggggtaattggtttgttgttggttttttttttttttttttcttgagacggagtatcactcttgtcaccc

SEQ ID NO: 70200 - DNA, 3207 bp, Homo sapiens
ctggactgcgagggtcaagaagccttcccagggtggaggcgaacttttgagatggccaggaaaagatgaacagaactactcaaagaagccaagtgcagagtttcagaggtgaaagaaaccaaagataccatctagggaagcccaatctccgccggctaccaatgagaaaacggaggccaggcagggtgggaggatgggtaagggacttacttacttgctgttagcagtgaagttacacggcctgtgagccgcgggggctggagatgcaaaccgagcttgggtttcttaagtgggtaggagtggagatgtatatgcgaaggagaagggattaggagtggtggaaaccaggtaggttttaatttagtgcctaggctccctcagctgcagagctacctcctgcggtgggggaggggattaaagatgactcagacctgccctagcccagagaaactccgtttgcagtgctgaagcatagtttttatttgggtttgggggaggaggtactgaacacacatacaggcaaaacaataagtgtagagttcagaattgggaaaccagtccctcttctgcagctgttcagctgtgtgatttgggataagtcacttaacctttctgaattgcagttcagtttatacttttgtgcgtttctttcagtctttttctatacattttaggagtttcttagagatcagtcgtgccctgtatttcacctcattctttcaaagctaaagcctcttgtttggtagagctgtgtttcagccccttttacagagcagtttgccagcctgtgcttgcccaaacatctagagaataactagcaagcgagccaggagaagatccaggagctgtaagaatcgttagcaactgagcatatttctataaaccaataaaggtttttctgttttgttcatctgttacccttatgctgttgccactttcacatgcagtgtctgtaggcggagagtatgagataacagcatttcacaaatgaaagtgagtggaaaagggctgcttcccctttaaggcagtctcagctccagctccctcccctttcctgattgacaaacctacccgaagtcacatgatctgcctctatttgaaggtcacaaaaagctgcttcctttagagacagagagggagagagagagcaagagggagagtgtgtgagagagagttagttcaagccaaaatggccgacagagtctctgctggtttctgaatatttaaaatacaaaaaaacagatagacaaaaagaattcattttttggaccttttttcatttccatttctaccttgtatgcctcaatttgctggatttaagcactgctgcactttatgaggttggtaaatattttcaattttttttaaccaattgatttatatggatcttgtctaaccgttttcactggtggtgttgcaaatcgacatttgtctagcatggagactggcttcagacatttcgtggatctgtgtaaatcagacccgtgatgtactttggttcggcattttagaaatggaaaagacgtggtaaaatatttagattttgaagtgatttaattgcacttttaatgtatatgcagattttcatcatcgtttctatcttgcaataaatgaagctgcgagtaattggaaatttgctatttagaaagaggtttttaaaaaacacagacctccccctccccccttaaatctgctgcaaaaatttgcataaatataaatgggtttgcattctttcggctgctaaggccgacaaaggatctgggagggcaagccctagaacgggaaagcctttttctatctttttattttttaaactgggccctccttcctagagagatgtaaaacctaaagtaagacctaatacattttaaacatcaggttgggggcgggtgaacaccaggaggtttggggtttgtagattcccctgcttgaaaacctcccaagcaatatgtggctcacccctctcctttctgcgcgcgctcatttgcactgggtctctgtgtgtgttctcaaatgtgcagccagatgcgcttttattttgatcctggattcaaccaaagggtaggactatgttgtaaacatggtgttttaaagatatgaacagctattcaccgcgattagaaattatttctttatcagttctccctgtgtattagccttcttcattcctcacgaaataaaatttttgtttaattttacacagatgcaaaactgagtttttcagcataaattcatcgtgtgagtgtgtggttgcctgtttcggccatgtatccactgcgaagtggtcatttagggtcacatgtataagtagcagtctatgtgattgttagtaacccctgaagctgtgcagtgcctgaagttaaattccattactcctaatgcaggattctggaagcctgagagcagggaggaaagaaagctgaaaacttgctttctcagagcctcctccccctatcattgtgagagtgtgatgtaatgcttctcggtctggtgggctgaaaggattgtagtttgtgatgtggcgggtaaattgcccccacccctgggtaaattactccacccccctgagcacatccctggctctgagaggccttgttttcttttctctttttttcctaatttgtatcctcctgatttatgctgtggcatattggcatgagaaagagactgttcttctaaatctgttacaaagtatagtttagaaaaggcatttaaaatatgcaaatgggttgaattgtcatatccccatcattaaatatgtagacgtggattaaagctaattaagcataaatggaataattttgatcagaagggagcagtgttttttgttgtttcctttttaattaatctaattatgagatgcttactgggcctgaaagtgttaaaaaagataaagtggaaaaaatgctggaccattttgaaaatttgacagtctggaagagggtgtgtggtgctttcaaaagctttattcactcttaaaatggattggcctcttgtgctgaaaatggcctgtttctttgggccaattgtgtgtagatgaagggactttcacgctaatttaacaaaaagactttccatttgaatacataagataattaaagccctctgtctctaacaagcaaggattttattattttaaaaaattaatgttgttatgttagtaatggtaataaatacagaagtgactgtttagattcactgtaaatt

SEQ ID NO: 70201 - DNA, 964 bp, Homo sapiens
tattctgtgtggccactcggatggtcctttaaaaataaacttccgaacattgaagcagagacttctaaggcttctccagctcttcagctctacaagagacactagaagagtgttatgcgatgatgagaccttcaggttctgcagagcaggctgagcagctctggctattgaggaccaccctgaggaataagggtggtcctcaccctacccagctgctcctcaccctacccagctgctccatgactgaaaagtttggaaagattttaatttttataactcagatcatataatcattgatcatctgcagtttaagctggacacagccctgaggcaatgcagatagatgaatgtactttgtccctttcctcaaggagtaccaggtcagcattattggtaaacagatcgtcacaacttggcagtttatgtgcaatattcagagcaagttcctggttacagaagtatctgagtatctgcattaggagggtccttgttttaaaatttcttaaagaagccaaataggccagtcgtggtggctcacgcctgtgatcactttgggagtcccaggcaggctgattgcttgagctcaggagtttgagaccagcctgggcaacatggcaaaaccctgtccctacaagaaattttaaacaaaattagctgggcatggtggctcacgcctgtcatctcaactactcaggaggctgagaggtgaaaggatagtttgagccagtgatgttgacactgcagttagccaagatcgtgccactgcattccagcctaggaaacagctagaccctgtctcgagagaaaaaaaaaaaagccagccgggcgtggtggctcacgcctgtaatcccagcactttgggaggtcgaggtgagtggatacgaggtcaggagttcgagaccagcctggacaatatggtgaacccttgtctctactaaaaatacaaaaaaactagccaagggtg

SEQ ID NO: 70202 - DNA, 1087 bp, Homo sapiens
attgtatcaccatctgaaattatttgtgtatggtacgtctccacaatactatccggtttcctgaaagcagagaccttatctgttttcctcactgttgtatccccaacatctagaacggcttggcaggagtggatgttgagtgaaaatgtgtgagtataaggtcaccaggactcactgtgtgacgatggtaggctcgtttcctcaccagcaaaatggggataatatattgttgcgacgcataaaggaaatgctatatgtgagggctgggcacctagtcttgttgcttagtaagtgtttccttcccctttgctgtatctccctttgttgaatgaaccagaaaggcttttatggccccgcagaatggctctgttctttctcatggctaccaggatcatgaagcctgtacagtgattgcacagagctttagcctgcacaaggacaggagcagcacggagccttttctctttattcaagtccctacattcctgtggtctgatgtcgtctcttcataactctccagtttccttcaggctgtgcctctgtgttgtatccacgtttacttggctgtttttcatacattctgtgctttgcatcagaaggttctcagcaatttcaaatgaattggtcttagagtttacaaggcaaaggagaacattgaatacagcgttttctccctcattgtgattattctgggcccacacatgtaaattctgtttatttgactaaattattactaggttgtttttttttttttaatatgagatggagtcactctgtcgcccgggctggagtgcagtggcgtgatctttgctcactgcaacctccgcctcctgggttcaagcgatgcttttgcgtcagcctcccgagtagctgggattacaggcgcctgccactacacccagctaattttttgtatattttagtagatacagtgtttcggcatgttggccaggctgatctcgaactcctgaccttgtgattcacctgcctcggcctcccaaagttctgggattacaggcatgagccaccgtgcacaacagccagttttgactcaatgggcaaaatgaaaatttaggtccattgccca

SEQ ID NO: 70203 - DNA, 780 bp, Homo sapiens
gaattgagagacaggcaggccaattaggggataaaaggactgttatgaaaggtcctgctataaggctatggccatgcaactagggaccaggtttttaaggtgaatgatgggaatcttcaaccaaaaggaagatgacgcattccaggtcagacttactgaattggagaatttggtgggacttggcaatggaactggttagcaggcagctggcagtgtggatctgcagcttgagaaagaggtcagaagtggagataaagacttggaaggcttccacgtggaagtgatagtcgaaggtaagggagaggatgaggtcaccatgggactgtaaagaatagaaaaaagaactgagaatgagaccttggggacgggaagagaaagaggacctgggaaaggataaaaagaacggtggctctgaaggacagtcattcctcatcacagaagatgagggaagaactgttcgatcacaggtgtgggcagcagttcaaatgctgcacaggaagaaaagtatttggttatggcaacattcccgaacctggtgttgggaggtgttccagtgttggtatgggaatcattcgatggcgccagcaccgcccagtaggaacagaatgcaagccacgtgtgttattttaaattttccaggagtcacattaaaaaagtaaacagtccaggcacggtggctcacacctgtaatcccagcactttgggaggccgaggtgagcggatcacaaggtcaggagatcgagaccatcctggccaacatggtgaaaccccgtctctact

SEQ ID NO: 70204 - DNA, 480 bp, Homo sapiens
aggttcaattttttttgcctttgttgggatgctgtggccagtagccagggccagtcattccagattcatcccctgccactctagtccccagggactaacagagtccagacagtgtacattttcctggctacgggcttgaccttctgcttcctctgtcccactgcattccaaaaatgctaacaagtgactagcgagcgtaaattttatgtgttgcaaaagcagttgtggaacttgggtttcaatgtttgcaccactatttgtaagcaggatgttatctctaaatgatacatgtgtaactgacccaggggggctgcctggcctccttgatgctcttctgtgagaataattgactctggtagtgacagagctgcctgcggctactaagaagctctgctgtacttaggccacctgccattgttctgtctctgctgctgctgctgctttttctatttttaataagttgccaattacttggttttt

SEQ ID NO: 70205 - DNA, 1727 bp, Homo sapiens
aatcccagcactttgggaggctgaggcgggcagatcacctgaagtcaggagttcgagactagcctggccaagatgatgaaactccgtctctgttaaacatacaaaaattagtgaggcgtggtggtgcacgccagctactcgggaggctgaggcaggagaatcacttgaacctggaaggtggaggttgcaggaagctgagatcctgctactccactctagcctgggcaacagagcaagactcagtctcaaaaaacaaacaaaaaaagaagtaaatgaatggaaatcagaaaataggatacacagccttttttttttttttttttttttttttttttaccccacaatgtttttatttccctatagtactgagatcatgtttaagccacaaacctttcctctggaagataagaaactatgcacttactttgaacagctcatctttagaaaaacttgcacaacttacaaatccttaagattcagaaaagagacagcctgaaaagtaacatattcagacttttaatgatagcttctcttgccctttatcgtctaacattctggaccatgatgatgggtgatgcacactgattctgatgtcttaagtttggactttgggagtcaatttggatcagacatcctgcctgaaaagctgtgttgctctccaattagtgccggcaattctggttggcctttaaaagcttaacattcttggattcacagaaaggtgtgatttaaaaaatagagtaagaattcattcaggtgctgaaacacagtttgctatgactaaggtggtgtcttgggcgttttctgactgtttcctggaggttttgtttttttctttttatactttgacctatttgtacatgatgtcctggagtttgaatgactaatctcctgggccagagcacactgtattgggaggaaagtggttgaggtgtgttcccattttataatgactttatcatttacaatccattctgtctctgatgtggtgggaaagtgccctgaggaacttttgcaaggaatcttacatgatacgtgatacctaccaaatttcttcagttgaaacagtgctgtgaatgttttaaagtgagtcaaactggtgttcagccctcagtcctgcaggtcactctgtcatgtcttgttgtttttctggattgagttaaaagtatgtagtagacctgggtaacttataatgaagattcttgacctttatagcagggcagccttacagaaacatagctctttctgtcctaaaaaccagttgggatgaatttctccagtctctgccaacttcttgtttattctcataataagataaaaggggattgcgaatgccctgtgctatagaatcctccagtaacagatagaaaattaatattaaataatcttcattcattcatttaccagttatgtatccatctgttgttataggtcatgaatattagataatgactaattttcttttcttttttttttgagacagagtcttgctctgtggcccaggctggagggcagtggcacgatctcggctcactgcaacccccgcttcccaggttcaagcaattctcgtcctcagcctcctgagtagctgggaatacaggcgcatgccaccacgcccagctaatttttgtatttttagtagagactaggtttcacaatgtcggccaggatggtctcgatctcctgaccctgtgatctacccacctcggcctcccaaagtgctggga

SEQ ID NO: 70206 - DNA, 2062 bp, Homo sapiens
tttggctttcttttggttatttacaaattaacaatgagactaaattaactgattgaaagggactaataaatacctctctaggttgacaaccaagatttaattaagttaattgggaattgactctttcagccccagtaccagtgattctgactttatataccgagggcgttttttttaaaaattgtgataaaatacatataacatataatttaccatagcgtacatttttaagtgtacagttcagtggcaataagtatattcacatacttatgttgccatttaccaccatctatccgcagaactctttctatcttacaaaactgaactctgtacctattaaacagtaactccccattcccccctccctctagtgagggcttttttgaccttaaaacctgtactagctggctgcggtggctcatgcctgtaatcccaacactttgggaggctgaggcaggtgaatcacctgaggtcaagagttcaagaccagcctggccaacatggcaaaaccccgtctctactaaacctacaaaaattagctgggtgtggtggcaggcagctgcaatcccagctacttgggaggatgaggcaggagaattgcttgaacccaggaggtagaggttgcagtgagccgagatcgcgccattgcactccagcctgggtgacaagagcgaaactcagtctcaaaaaaaaaaaccgccccccacacacacaccaaaaaaacctgtactaaacttaagtacttcgtcactttcaaggataataaaattgatttgatgactaccatcacgggctgggcacggtggctcacacctgtaatcccagcactttgggagaccgaggcaagcggatcacgaggtgaggagatggagaccatcctggctagcatggttaaaccccatctctactaaaaatacaaaaaattaaccgggcatggtggcgggtgcctgtagtcccagctactcgggaggctgaggcaggagaatggcgtgagcccgggaggcaaagcttgcagtgagttgggatggcaccactgcactctagcctgggtgacagagaaaaaaaaaaaaaaagatagctatcatcacaacatagagaattttcacctgtgaaatacacaactgcacaaagccccagcccacccagtcctcttcatagttccccctgcttccctcacagaagtgaaagtggagctcatggtcagtgccttgttcaggggagaaactagtttgtcccattaaaaaattaaaacctacctctgccctactttgcccaggagatcagcaatggtgtcttccactaggtctctttaccaccaggaccaatgtcttttatgctgtgaaacaaacagaggaagcactatgagttccttataatgcccagtttaaataggctcctttccaaatgacacgcactgacatcaaactgttttctcctaacataaaccagtttgggttacgaggagagcagcctaatgaaagtgaaagtagtcgtgtgcaaaacttctattttagaaaatcatatcagacttctttctatttgaaaagcaaaagtaccagctgagcatgtatttttccagttacttctggttcagtgtggtgaattttataaaaatgaaaacatagatataactagggcttattaatcatttaaactaacataaaatatcaacataattttagttaaagagaaataggacttaaaaaggtaaactcaagtctacattttcagtctgtattaataaaactcaggaggctgaaataaattatttggttctgaggttccgtgtttcatttctgtagtgctcactcaaaggaggaaacaatgattcatggatgaatcctcttgccaaacagttttcaaatatgggattgctggtaagttttatttttttcaaatgtataacgtatcccaacttttaggtttaatattaataccaattttaagacaactgccacatatagtacaaaattaaagatttaaaaactagttaagcaatgttcttgaccttttgagttaagtaatatttctcttctattcttattaatgacatactccaaca

SEQ ID NO: 70207 - DNA, 2197 bp, Homo sapiens
gacacctggctcttacagctccagatgaaccctttcctgtgtgatcaccccactggcactccagactgaacaacatagcaagaccctgtcaaaaaaaaaaaaaagggggggggccacttgagtgtttctatttctatttatttatttaattcttttattttttggagacggagtctcgctctgtcgcccaggctggagtgcagtggcgcgatcttggctcactgcaacctccgccttccgggttcaagaaattctcctgtctcagcctcacaagtagctgagactacaggtacaggccgccatgcccgactaattttttgtattttagtagagacagggtttcacgtgttgcccaggctggtctcaaactcctaagctcaggaaatctgcctgcctcgacctcccgaagtgctgggattacaggcgtaggccaccgcagccggctcactgggggcgcagtaaatgccgatttcccttgggtatcttcatttctccttagagccgagctcggtgcgccgcgggcaggagtgggtggggcgacagtaataagagtaacagcaagcgtacacacggccttccaagtgtgccagacaccgctctaacactgaatccgcacaacccgaaaggcaggcctttttttttttttttttttttgctttttgttttttagagacgggagggtctccctgtgttgcccaggctggtctcgatctgtcggcctcaagcgatcctccggtctggggcccccacagtgctgggattacaagcgtgagccaccgcgcccggccaaggaagtcttaatgtacctcttttcagacaggaaaactaaagtgtagcgcggctaagtaacgtaggaagcatcaatcatgtttctggtcaaagaagcgaaccaagtcaattctcaggcagaagcagcggagattctccgcagccggcagcgcccagggcgcccggaacccagagagcgagaccgcgtgaaggaagtcccgccccgccccgtcctgccctggcctccaggtttccgcttccgctcttccctggtccagtccaccctggcggggtcgcagggttgggatggcggctggaggcgatcatggttcgcccgacagctaccgctcacctcttgcctcccgctatgccagcccggagatgtgcttcgtgtttagcgacaggtataaattccggacatggcggcagctgtggctgtggctggcggaggccgagcaggtaacggatcccgggctgaggggctgggccgggagggacgggcccgccccagcacgtgccgggctctgttccgggctgggcttagccaccccggagctgcggcccggctattttcagctgggtgttccctgtcctgaggagctgcggccccaggaaagcaagggcaggagatccgggagccgccacctgttgcctcacgtgttctcagtccgagagggttcgagacgcggaggaggctgggagaaattcagcctgtagtttcagggaattcattttggccatccccgcaggagtacgctgctaaccacagacaccgagcgcttgtttcgtactgttgtgctcattatttcactaatcttttcttgtgtaatccatgaagatcttgcaggcttgatggtgtttttcccacattgcaggggagaacaaagcccggacagcttgttgtttgccctagcccatccagctattaagaacggaactgggatttgaacctgggtgcactccagagcctgagctgagcacgtagccccttggttttccacagtgcctgtgtagttagtgacaggactggaatgcttgttttctaggccaccgtttctgcctcactggcctccgctttgcctcttaggagaagactccgggtaggggtttattaaacggggtttataatttcttttctaagggctgcatagagaacttcttagcccagcggtttcagaaatagctccagaagagttgaagcaaactgaaggtgatccagagagcgataatgtttctcctcaagtttcagaggaaagtgccacaacgagcaagttggcaatgccctctcaaacggcacagtaaacatggaaacaatttgacttcgggcctaggacctgtaccatggaactctccaaacaggaaactttcattctagattccctccctccccttatcactgccctccaaaatattgggcgatacactacaa

SEQ ID NO: 70208 - DNA, 1194 bp, Homo sapiens
acttcagcctgggtgacagagcgagactccatctcaaaaaaaaaaaaaaaaaaaaattagcaagttatttgcagcgtctatctcccaccaccctgactgctggtccacaccatactgtcccaagcttctcaggctgcggtgcagacgaagaaatcatcgctatgcatgctggccttgggatgggggcgcaaagcccctggacgcgccccgcctagtgggcgggaacgactacagcccccagcatgacccgcggccgcccatgccacgccccgccacgcgtgcgcttaggcgccgctgagcgctgactgggtgcgagtggggaagctgctaacccgacccggattggcgctgaggtggcccgtggggcaggtgagtgcggggcgggagtcagcggagacccaccggcgcctacaagttcccctcaggcgggggctgcggggcggctgtggtcggactgtccgaccgagggtcgtatgggccgaaggcgcccacgagagaagcaccgcctcgggccggagagccgccgggccgaccttgctcgcgtcgccgttggaatgggggccggggacgcggcggggcggggaggtcggctgcgtcctccggtgcggccgcccctagacggccgaggccacctcaggtgttcggggcgccagccggaatccaccgcgctggcagccgggagcggttttacgaaaaccgcgcctgaggcggggggctttctaaaaagagcctggctggctctggcaccgggacagctgcagactcctcctcaggtttaacttgcggttttccctttaagattcagatccaggtgcagaacccgggctcggatccaggcccgagactcggaacaccggtgtgtttgcattttagcacgggggaaactgaggcatacgttagccagaatcatccggtgtggttaggactggaattttgaaaattattctcatacttagtttactgacctaggctcttttttatttggaaagaaaaataaagatgtttcaaaggttgttttcagtgactgggtgactagtgtatcttccagtctcacgctgcacgtttgtggtgggttgatggctcttttttgttttgcggtgggatagagatgtcctggaatgttctacacctttcttattctttcttagtaaattcaagtcaaatcagactctgattcacaaaaactcattttca

SEQ ID NO: 70209 - DNA, 3960 bp, Homo sapiens
tgcccattctataagcactcagtaaatttgagctgttgtcctcacacaattatgtaacacatacatatacatgtttctatatatgcacaggagagagtagaagcacagtcaccaatctgggtggttggaatagaacaatctattttctctttctcccttttgtttatctgtatcttctacattttctacatcaaataactactgtctttataataagccaaaaatctttttctcaagaaagggcaccaggctgagtcaggagtcctggtttccagcaatattactaatctctacaaaggagtggctggagtagacaaggtgtcctctatctctaaaatggaatggttctctaagatttatggtgggatttggcaaagctacaccctttgttttgtttcatttttctgtcaatacttactgtctgcctatcaagtaccaggtgttgtggacacagaaaggtgaaacacctgcccaaatggagttgacactacaggctgttcaagaaacggagacagccttgtaactatttatacaatccctcagcatggtaagtgctctgatgaggacaaagaagaggggaccttgctggggctggagagttagagaaggcctccaggaggagagaaggcacctgcactgaaatctaaaatcatttttgtttaagtcaaaccaaaaagatgggaagggcattccaaccaaaggcagaggaacgcacaaaagcaaaagttatgaaaataacaattacttgaggaatggagaatagagagaaagagaaatagagaaaggtcatttggacagcagtgtggaaacaaggagggacaaagacagcagcagagaggctggtgaggaagaggaaaataatcttcagaaatcatatgggtcaggctggctcacgcctgtaatcccagcactttgggaggccaaaacaggtggatcacaaggtcaggagttcgagaccagcctgaccaacatggtaaaaccccatctctactaaaaatacaaaaatcagccaggcttgatagtgcacgcctataatcccagctactcaggaggctgagtcaggagaatcgcttgaacttgggaggcggaggttgcagtgagctgagatcgcaccactgcacttcagcctgggcaacagagactgtctcaaaaaaaaaaaggaaatcgcatggggtagtaaatcttttcttcttatgtaaaaggctacatatgccataaacaaacctgataaatattagtttaagatgtaccttggccgggcacagtagctcacacctgtaatcccagcactttgggaggccaaggctggtggactgcttgagctcaggagttggagaccagtctgggcaacatggcaaaactcagtctctacaaaaaaatctttttaaaatattagatgggtgtagtggcgcatgcctgtagtcccagctactcaggaggctgaggtgggaggactgcttgagcctgagaggtggagggtgcagtaagccaagatcacagcactgcactccagcacctgggtgacagagtaagaccctgtgtcaaaaaaaagaatgcactttactatatttacaaatatagcatgcacttacaaaaatttaccaaacaaaatgtcagcatgcttctattttccacagttaacggtacacacttcatatatatatatatatatatatttttttttttttttttttttttttttttgaggcagggtctcactctgtagctcaggatggagtacagtggcatgatcacagctcactgcagccctgatctcctgggctgagatgatcctctcacctcagcctcccaagtagcggggactaaggtacaagctaccatgcccagctgatttttgcatttttttgtagagatgaggtttcaccatgttgcgcaggttggtcttgaattcctgggctcaagagatccacccacctcagcctcccaaagcggtaagattataagcatgagccactgtccccagcctcattcaataaatatttgttgagtatgtgtcatgcatatggtaggtgctgagggagaagacagacacagacagtaaacaaatgaaccatcaaagcacccaagacaaccaaccagatgtctttttgtatggccaagacctatgcagatctctacctctcaggagcaggccacaggcaggatgatacagtggctaggaatttgcacttgaaatcagacagacctttgtttaaattttagctcttatcacctgttgccaactctggttttgagtaagttacttaacctctctaagctttcatttccttacctgaaaataaagataatatgaccaaatttatacggttttagggtgaatttaatcaatcaatcaataatcagtgtgttgggtatacagaatgttcagccaatcgtcccttttattttattattaattttccacttttagaacagacaatgatgtcccacaacacagacaaaaatattcacagggtagaaaaaaagggaaagaaaggtataaaaatgatctgtttaacatttctaaattcacatcttagtgaattcacaaccgtttttctcgtaaagatgtcatgcttggaacttacattcctttaggatttctcaaactgttaacatcttgtctgcattacatgacctagtaaattaaataaaatctatcacccaaaatagggaaccagccacaatctctccctggattccttgttctgattctctgactaatactgagtcatttaaagaacacagacaacacagagcactgataagcagtctgaacacaaaactgaggagcagaggtgccagagcacactatggactgaccacagactacaagcagaactttctgaaacagaaaaatcaagataaaaggagagtttcctaactggctgtaacttgagtaattatgccttccaagagaaaagcagcacagaaattaacatatttctcaagccagaagaaaacttttttaaaattttaatacctccttatctgtgaaaaaaaaatttttaaccaaattttaaaactccttcctccctataattacatcctcaaaaatgttttaactacctcttaaaatgtttatttcttacaaatgactctgtaagcaacactggtcatttaaagattttgaaggcatacataaaacacaaaaagaaaatgtcttctctgtgacctgacaccttaagggtcaaactgattttacttcaactttcaccataaatttccctttgtattaaaaccaggtgtgacacttcagcccaaaaacaagtatttaagaagcagaggaaacctggacaagattttcaagtagacctttttttttttttttttttttttttgagaccgagtctcactctgtccccaaggctggaatgaaatggtacgatctcggctcaccggctcaccgcaacgtccgcctccagggttcaagcaattctcctgcctcagcctccctagtagctgagattacaggcgctcaccactacacccagctaattttttgtatttttagtagagatggggtttcaccatgttggccaggctggtctcgaactcctgatcttgtgatttgcccacctcggcctcccaaagtgctgggattacaggcatgagccaccgcgcccggcccagtctatgatttttttttttttatgcttcattaaagtaaaagtctatgcctacaaagagaaataataacatactttcatattgctttctttttttttgttacagtttttattttttttattttttttttaacatttcattttttattttttttatatttttattttttttaatttatttttttattgataattcttgggtgtttctcacagagggggatttggcagggtcatgggacaatagtggagggaaggtcagcagataaacaagtgaacaaaggtctctggttttcctaggcagaggaccctgcagccttccgcagtgtttgtg

SEQ ID NO: 70210 - DNA, 7053 bp, Homo sapiens
agcccaggagttcgagaccagcctgggtaacatggcaaaatcctgtctctaaaaagaatacaaaaaattagaagggtgcctgcagtcctagctattagagaggctgaggtggggggatcacttgagcctgtcaaggctgcagtgagctatgacggtgccactgcactcccacctgtgtgacagagcaaggccctctctgaaagaaaaaaaaaaattgtcctagattaagaaccactgggttatttcaaggactaaagaagttgatttaggccagatgcagttgctcacgcttgtaatcccagcaccttaggccaaggtgggtggatcacgaggtcaggaattagagaccagcctgaccaacatggcgaaaccccgtctctactaaaaatacaaaaattatccaggcatggtgacacacacctgtagtcccagctaccaggaaggctgaggaatgagaattgcttgaacccgggaggcagaggttgcagtgagccgagatcaagccactgcactccagcctgggaaacagagcaagagagagcaagactccacctcaaaaaaaaaaaaaaaaaaaaaaaaaaaggagttgatttatatataaagtacgtagaacagtacctgggcacaggtgctgttactaagattagcacagtggcttctagggaaacataagtttctcctagcagcaattgaagacaattagattcgtccccaatttgattaagtaaacaacaaaaattcaaataaatcacagatgctgataggatgtgaaaaaatgtgtttgtctattcccaataagatttatttacgtgctgggcacagtggctcatgcctgtaattccagcactttgggaggccgaggcgggcagatcatttgaggtcaggagttcaagaccagcctgaccgacatggtgaaaccccacgtctattaaaagtacaaaaaaactagctgggcgtggtggtgcatgcctgtaatttcagctactcaggaggctgaggcaggagaattgtttgaactcgggaagcagaggttgcagtgagctgagatcatgccagtgcactccggcctgggcaacagagacagactccgtctctcaaaaaaaaaaaaaaaaaaaaaaaaaaaggattcatttagactcattaccactttctatggatataatgtattctgttcatactgaaatctttggcctcacagttgaggttgtctctcaattggaagtttctttaaggtggaagaatgttagtaatatgttctttccattgtaactgtggtttgagggtacttttttttttgcaaagtaagagtctggcttctggctgggcatggtggctcacacctgtaatcccaacaattttggaggccaaaacaggagaatcacttgagctcaggaccagcctgggcaacatagcgagactctgcctctaccaaaaaaaaaaaaaaaagaacttggtttctaagattatcatatgctttgtgttcacggtagcttttaacaaggtgctggtatcaacagctcaaccctcaaacatccatgctaacagcagaaaatacattgcacagaaagaaaagatggtagacagtatcttttagagtgggcaggaatgcttgtatttgtatttagtactgagtaattatttccaattttcgaggaagtcacaaagctgccacaaattgtttaactatacaattcttcctttgccagggtccagtgcctgctcagcttatcatttcatactggcaaacaactatacaacttttcctcatctgtgatacaaagattaaaataagcagaggtggtcacattctaaatatttcctggttcacaccttcccctattagggaaatcacttttgggcacaaaagatcatccattctaactcttactgggcaaatatcttgtttgtgtcaactaagtattttgtacacagaatataatgccaatatcattaagtatttgaaagaaagatttgtcaaaaatatccctgttatgacctactcttaggataatccaggattgataaaaagccaaattctccccatagccgaaagaggtttgcctcagcctaaggctattttccctaagtgagagtttctaaactttctggtgagcttctctttctcatccagctggtcaaagttttctgataacaacataccacacaactgaaaagctaagtttctcggcctgaatttttgtttatacctgatagaagctactgctttctcctagtggaaattcaaaatacctaagtttatctccagaaaactcttcaaatactttcagtaatctaatggcaacagctttgctactaaaaatttcccaacatcttcctgtttgggcaggtcttgctgaaatccccctcctcataaggaggaatttgagaaaaaatactgccaacttcaagttcccttaggcaaatttccagccccagtgcaaggccatgaggttaaacatttctcaatgacgcaggctccctcagagggaggaacaagaaaaaaaaaaaaaatcaaaacgtattcttcccactgcagtaaatcaagaaacagcagccaagtactttaaaaaaaaaaaaaaagtgaagttaatactgtttgctctgccaaggcccccagtgggagtacagaacccaaatgagagctgtgggatgagagaaaaagaattgcagaaccagcaatccagtcaaattgacagatatgtctccagattctctagatagtctctggagtaccaatacagtgtaaggtcccagccactgtataatttacaataactaggacaactaaagtaaagtgattgaattagtggctgggggtaaggaatggtgtcacacattaagcaaatcatgattcaggattaaaatgtacattaggtgagaggccgggaaaactaaaggaaagtacatttaagcaacttctcggtgaaggaatatataaggctgatcacaaagaaggcaagctcatgtgaggggctggtagggttcttgaacctctggccacctgcagataaataattgattgaaataaaacccgaaatgttctccagaaacagattaatacaaaacagaattttagagttcaaaaggtcctaaatgcttacaagaaaatgccagtgatgaaaatatcatgtgtacagtgctttacttctcaaagtgctttcactgaatcattaaataaaaattattatgtacctgctatgtgttaggaactggcaatacagaaattggataccacccctgctttaaaggggccatacttctaacaatgagacctgctaggaatgaaaatgcagcaaacaatcagtctttggtggtatgcagtaaacataaggagagcacagcagaaggggcaccgaagtttctgggggaatcaaagacagcacacatctcagaagagacagcccttgaagtgaggccagaaggctggcaagcagaaagactaacggttatatgcaaaggaatatatgtgctttttttaaaaaaagcacgaagtgttctgggaaccaaaagctggtcagtactgctggggactgtgagtttggaagtgatatgagataaccacatagtcagagaccagacaaataaaatagcttaagttttaccccacaagaaatggaagaattctgagcaggagaaagaaaatgattagaattggtagttagcgaaagtatcttggcagctgaatggacagattggaggagagttgaactatagccagggagcccaataacaagtcccctgaaaccacagagaaaaatgctgacaatatgatatagggcagagagacaaaatataagaagtcaaggtagaggtaaaatctagagaactcacaagtcaaatagatatgacaagtacaacaagaaaggaggaattgagactgactcctaattttctggctagggcaactggcactataaattagggaatgcaggttgggagtagtcactgagaatggcgatatcagttttaagtgcacactagtcatttagatgtccaggtgggaagaattagtggattaactgaatctagaactcagtaaacaggtcagggatatagatacatatacacgtatcacatgtgaatacctttcctatttggaggaaattctaagacggggaaaggcagtcaccttttcccactacaggaactgacagtaacagaaattccctctctctgttccctggcatctagttcacaaatatataacccaagtcaatcagatcctcctatgtagatctttgaatattgaaagaataacacaaaggtggaaaatataatcagaaattattcatggcactgtggcaagtgcctactggtggcagtgccagtagtaacagatgttcatgggagaccaggccagcagcagtggcagagaaggtccagcaagcagtgctagagagagtcctcagccaactgatcccattacatggtctttactatgtcttgcctcactcagtttctgctcattttctgaactgtgttatccagccttccttttaaggctgtgcactatccaatacttttccaatatatttattttatgcttaggtgaaccaagattatgtgaaaaatcctgagtagtacagaacgaggagggaacatagaacaggtgagatgaggcctagaatgggcccactatatagggtgactagtaggtcactatgaaattagttcatatgtgtcatctccttccatccttacggtcccttgtgaggaaaataaggccaagtaccatatctttattttaggataaataaactgaggctaaaagagattaagatcatacagttctttttgctatccaagagtgtcctcaaaaaagttgttttacaggtgctcatcaaaaggagatgttaaatgagcaatactaattcttacagcaaatgtcaatggacacagatgataaccacacatgggtcccaatgctggtcttccagcttcttcaattttggtaatataaagaagatcctaacagaagcattaaattccttatagacaatcacctagaaacatacctaatgaggatccttgccatcatccttccactcagggtaccttggttactactgaaagaatacatcataagctaaagggattcctcaagtggaagaaaggatcatctatccctaaccatgagaaccactgtgggaatgagaggttgagagctttcgaaagatgattatttctcaacttcattcctttgggatatgtcacagccagtaagggagaaattggaaaaagcagctttcacaagctgccaaatccatgtcctagtcccaagggataattagccagtgaggttttgtggagctgatgtaatgttggcagaggctaatgttttatggttgaacatgtagcctcttgagttttagctacagggctaaaaggatgacatcctgaaaagctaagaaattcatacccataacaccaccacttcgcaatgtgcatcttaaaagtaatttgtaaactttaactgatccatctttatcatgattagttatgaacatttgttaaactataaattctctaaattttattttatgtaactattttgctatgaaaagaaatttctaggtaacacagacaatttagaaagcttaaagtaacaaaataattagaagaaaggaaagttttacaaggagtgagtctgtttgtggcactttcatcccactaccaccacaccaagtttaaagccatctgatgagcttatgaaaacaatttttgaaactgagtagtctaagccaaaagtgttcaggagtaccaaatctctcacaaaaagtgtcaatcttagaaaccttagaagtattctgagatgcaggaggtaagaattaacggacaagaagcagaaatattaaaacactaacactcttggtttgagtttgagctgttaaacttcttgcaggcctggcacggtggctcacgcctgtaatcccaccactttaggaggccaaggcgggtggatgacctgagatcaggagttcgagaccagcctggccaacatggtgaaaccccatctctactaaaaatacaaaaattagctgggcatggtggtgtgtgcctgtaatcccagctatttgggaggctaaggcaggagaatcacttaaacccaggaggcagaggttgcagtgagccaagatcacaccattgcactgcagcctgggcaacaagagcgaagactccatctcaaaaaaaaaaaaaaaagaaaaagaaaaggaaaagacaaaatgcttgccatttaaaaaaaaaaatgagtcctttgacttaaatatgccacaatgatctccaaatcctgaacaaaactaagtacattaataaaaaaataaaatcactaatcagtaaggcaaaatatgtagtgcttttaaatatgtgctagctccttaataagagacaacttttgggctgggcgtgatggctcacatttgtaatcctagcatttttgggaggctgaggcagaagaatcacttgagccaggagtttgagaccagcctgggcaacatagtgagagcctgtctctagttaaagtaataattttttttttttaagttaaaaagaggccgggcacggtggctcacacctgtaatcccaacactttgggaggccgaggcaggcagatcacctgagtgaggtgaagagatagagaacagactggctaatacggcaaaacccaatctctactaaaaaatacaaaaaaattagccagacatggtggcatgtacctgcagtcccatgtactcgggaggctgaggcaagagaatcgcttgaacccaggttggcagtgagccaagatcacgccactgcactccagcctgggcaacagagcaagatcccatctctacaaataaatacataattaaataaataaataaataataaaagttaaaaagagaaacctctgattcaactctggggagaggtgtatccattcaggaatgtggatatgaaaactgtggtttatatatctttataatttcctaagaattgagaatcatgtttcttaaaatgaatggtggggaggggggagttacagatggccaaaaacaaaaatgtccctcc

SEQ ID NO: 70211 - DNA, 1428 bp, Homo sapiens
tggaattcttacaaaatccacttagaattcgatattctagacatatgtctcttttatgttttcgtgatttttgttttggaggcttttggtggtggtggtggtggttttgtttttggggttttttttttttgaagcagggtctcactctgttgcccaagccagagtgtagtggcaggatcttggctcaccgcaacctctgcctcccggtctcaagggatgctcctgcatgatctcttttaataaagttagtctaatctgtgcttaagggaaacaataaaaaagatgtgtccacctgtgaggcagaattttaaatggaaaactacccctgagtttaggcttggtgggacccgaaaaatgagtgaggatgggtacatggcgtagaaggaaatttgaggataaaactcagggccacctatagagatggtccttctcacttagagactaccctctagaactcttctcaaaccttggagggttttgtgtaatatttcatttagtcagctcacttcttggaaagagatcagggttgagagatgaaggcgatgttgttttagcgttacctaccagtgctgccctctcttctcatgcttgcttacttccttcaggagtcattttaactccaacctccttgtgtccaaactggctcaaagcactccaaagtggaggtgaaaggcaatcacgctgatttgttatacccaatttgagacatttttctgttgtacataaaagcaaaaaagaaataaaagcaatagaatgttccataaacttaaaaaaaatgttataacaatcacacccactcatgggttctgaaaagcacaataatggagtcaggctagtacaaacgcctaagagcaaagtctgagtgaaagtgatcaatctagtttcactttggaaactggatagaaactagcaacggaagtcagactctatgaggtaatttttgcaatagttgttggccttataattaataagagataagataattttaacctaaaggtcattttaagcttacaacaactagagataattttattataagttttaaaaactaactttattgaacttcaattcagacacaataaacttcacctagtgtacaattcaaagcgttctgacaattgcatatgcctgtataaccacgacaataaagagatatattttcatccctagggttttcttgtgtccctttgtattcaatttctccttccacttccagccccaggcaatcactgatctgctgtcactctagagaaacctgaatttttttcctcacacaatttaaaaaattgagatacaattcacatactataaaattcaaccattcaaagtgcataattccatagtttatcgcaactaattccagaacattttcattgccccaaaaataaaccctgtatccatcagcagtcactctccatttcctgttct

SEQ ID NO: 70212 - DNA, 585 bp, Homo sapiens
ataaaagtgaagttccaaaaaaacaagactttatgagtctcgtctttatttaatttggcactgttttaataaagctaaaactgtagttcttggtcttgacagcttgcctcatccaaaaagaaacaaaaaggaggaaaaaaaaagatgcagactgacaaatgaattcaaatttctttgatccgcgtcctaactctaaggggacttcagataaatcaatgagtcacagaaggggcaggaagatgtaagccagaatactgatgacaacagctgtctgtctacctacctgtcttctgagatcatcattaaagtatgagatcaccaagaccagggaatacagagtaagataagatggaggcccactggagaattatgaggcctgtcgcattctgactccacttcccagcgggtggaaggtgaatacccaggcactggtttttatctccacctcctaagatgtgagtcattctgagtagtgacagaatcctgcaatggaaaagcccaaagaaaaccaagatctttgggaaaaattataaacaatctcatttattagaggcctctgatggtttctttgaaatgggtaaattt

SEQ ID NO: 70213 - DNA, 2511 bp, Homo sapiens
atctcaaaaacttgcaactcggggacattccagacgtcttatgagtttaaaactatgtaaaaacatacgaagcatggggtaattccattattatatttaagtgatgtattccacattcctgtatatacacacacttcatgccaaacagaggctggcaagcaagttaaccattcaactgccctttcgttatgctgcataacagggagacaacagagagaaatcttgacaatgccaagctgggctagtgcttaaaggcacacaggcaaaccaggcattctcaacatcccaaaagcaaacatttcttgggcccttactatgggccaagcactgtgtcaaacgcttcacgtgaattatttcattcgacacttacaacaaacaaccgtatgcgattggtgctattatcctcatttttcagacgaggaaaccaaggcacaagattacacagctagcaagtggcaggtttgggagtcgactcaaaaggtccagccctaggcactatggagtatcaaaggtacccgaagcggggagggtggactgcatcagcgtcctgacagacgctttcttaggaggtaaagttcttggccatcaagtttcagatttgcagagccctgtacacctggcagcattcaggtttgctatactggcaccaacaagtccagctgagcctccttgcctgggaatcccaaggactgcacttggatcctgaaggtctgcacaagaccccagagaaagcggccgacaccccgtccctgcaatcaaaacacatcccgggagaagcgagggcgaggacctccgtgcctccccgccccgcgcagcacagccctgccaggcagtgcacaggtgcacgaccgcgcccgcccgcccggcccggcccgggtcccagccccggcacagtgaccgccgctctgcgactccggccccgagggcaggggcagaaggccggcaagaagagggcaggggacgcgagggccgcctcgcccgaccccccgaggacgcgcgcagcagggtcgggggggaaaaaggatgctccaggcggggcgaggccgcggtgggggaggggtccccaacccggactctcactcaccgcctcgcgcggctcccggccgggttccgcggctcgccccactccggctctagccgcccgcgtctcctctcgaggctcactgtccagcccgggcgcacggagctgagaagtcgccgccagcggagggcgtgtggccagcggcaaccaagagggtgggaaagatgggaccgtcgctctcgccgccgcggccaccacagacactgccgccgccggctcctctcagccacggaagctgcgggcccgcccaccacgcccgcctcccgtcctgaagactgtccgctggagaagtgacggcggcgctagccaatcagaggcctgatcggggtcgtgatcggcggactaaagggcgggcggagaaggaagcggcatgaagaaggcgaaaacggcggcctgacttcctgtgactgacggcacggcgcagccaatgggcaacggggagatgacctcatctctgaggaaagtctggaactggctgagctgcggcgagggggttggcgacgagccgggggcggagctctgggccttaaagaggccgcagccctgtggtcaccctgtgaagggaagggcggtggaccctgccggatcttgcgaagttgccaaggggtcaatgcccaggcgcgagtaattactgcattaatcccagaccccatcccgattcttgtcggggactgaagggtctccgcctggggctccgaagtcgatcatttcacattcacgcttcccaaaacgagacacaataaattccgctctggcctggagccttgaattcccgttacggtcccgccccgccgaggcccgtcgccttgtttctctgagtcagtttccccaacggtgaaagggaggacgctgacacctgcctgcccctccctatctgccgaggccgtggagatcagcagcagcgaaagcgctctgggcttagaagaggaaaagggctgcgtgagcccaagagcttgcatcggaaggctccaggaagagcatctgcaaaaaagaggattccacgggatgacccccgacaactcttggaattctaaaatcctatacccttgcccgcacccattcgtgtagtgaaggggcgcgcgttaggcgcagaggccacacgctccgcaagtgaacccgggcacctctctgaacctattccgggctgagggcggggagcgggtggctgcccgatttaaaaacatgtatatgtatgtgtatgtgtatgtgtatgtgtatgtgtatgtgtatgtgtatatgtatatgtatatgtatatgtatatgtatatgtatatgtattatgagtgaagtccatgactgcaacagggagaaaggagaaaggcgaaaggggagagagcaacaaggtaagccaggcccactgtgatgacagctgcggtcatgcaggcccttcgtatccgccttcctccccagcaatgggagagagcccagaa

SEQ ID NO: 70214 - DNA, 2378 bp, Homo sapiens
tgttggctacatacaaggaactagaggaaatataaaaaggtgaaatagatcagctttgccacaatcaagaacagggtccatgaaatgatgctaacacgaacaatgctgaaaggatagtagaatgaggtctggtctaggaagggagtgttcctgtctggtggagaacccactgaggcaacacatgaaagagcttatgtttgacaggcagtaatgaggtggggcactccaacttaggaaacactgtgagtaataacgtggaggaaggaaaacagaggacatgtttgagcaagggagtcacctgggttgtttgagagataaggtttgaaagtttgctgaggccttgttgtaaaaagaacgccatggtaaaggaggcattacgttctggaaaacagaatccagactgtcttaagattcacctggtagtttgtcagttggaatggaaggagagtgaagtggggctggaaagataaattaaaccactactgttatccagccaggaggaaataaagacccacaagaggggaacaatcagcatggagttttttcccctctaccctgtaaacactttccatatctctgtcccctagacattatagcatccttgagaaagggcaataatttaaaaaaaaaatatgcccataacctttaaactgctaacaatttcttcaaatgtagtaagcactcagcaaatatctttggaagtgaattaaatgtataagtgaggtgttaaaatgctagggctctgtgaccaagcaaggtggcccatacctgtaatgccagcattttgggaggccgaagtgggaggatggcttgaacccaggagttcaagaccagcctgagcaacatagcaagaccccatctctattatattaaagtttttttaaatactggggctcaatcgggtgcagtggctcacacttgtaatctcacctctttgggaggccaaggtggcatatcacttgaggccaagagttggagcccagcttggccaacatgatgaaaccctgtttctactaaaaacacaaaaattagccgagcatggtggtgagtgtctgtaatcccagctactcaggtggatgaggcaggagactcacttgaaccctggaggcagaggttgttgcagtgagctgagatagtgtcactgcactccagcctgggtgacagagtgagactccgtctaaaaaacaaacaaacaaaaaaagctagggctctgtttacatagttttattgggtcatccctgggattgcaaacacctagtatatcacttgatcacaaaactgagctagtttttattcagcacctactgtgtacatcatcatctcattgaattcttccatgaacacttcatagaaggtaccagccttatgtccatttcacagatgatgaaaactgagggtcaagcaggtagagggaccaacagtccagtttgcaggaactgaagggtcaagatgcaggacttttactgaccaggggaaactaggaagcttggtatccctacccagcgaccttgatttgcatcacacatgccaaagtttaaacacaagtttgattaactcaaacccccgtgggattttattctggctttctgatcattgcagccaatataaatgtcttctttgggtactttcaggatacaatccaaacataacctcgaatctagctcatgtagtcggggcctacttgagactgaagtacttgacaggcagagaactcaaaatggatgggttttcttcagcaagaaaaggaatccaggctggggaatattcctggaggacgtccttaggaacggttcgattatcagttgttctttgacgccccctggtggttgagaactgtaaccccgtttttgccccctggagtagagaagaggccgcgctggtaaacaaccaagaggtggaactgaactgaaagttcttattgcttgtggaacaaaaagattttgttttaaaaacaaaaacttggccgggcgcggtggctcacgcctgtaatcccagcactttgggaggccgaggcgggcggatcacgaggtcaggagatcgagaccatcctggctaacatgctgaaaccccgtctctactaaaaatacaaaaaattagctgggcgtggtgttgtgcgcctgtagttccagctactcaggaggctgaggcaggagaatggcgtgaacccaggacgcggagcttgcagtgagccgagatcacgccactgcactcgagcactccagcctgggcgacagagctcgactctgtctcaaaaaaaataacaacaacaacaacaaaaaaacttgcaaagattttttttttcttaaataaaagcttgccatgatgttatagcctagggtgaggagaatcagacacaaaatttaagtggatgccaaaaa

SEQ ID NO: 70215 - DNA, 1070 bp, Homo sapiens
cggcctttgcactggcgatttccacagccaggaatgctggtcctccagaatatttctaagcatggttcctcacttccttcaggacttttctggaagcgcttctcagtgaggtcttcctcgatgatcaatcctatataaaatagcaacctccacctctgctggtattcaggggccagctcaccctgctttaagtttttcatagtaattgccaataccatgaattgtcttttgaggggttttctgtctccccgcaacttgaatgcaatcttcatgaggacagggactttatcccccaccccacccccacttttttttcttttttttttactgcaaaacctagaacagtgcttggcaggtagtaagtactcaatgaatgtttgttggatgaacccaataagtaaacaagatagaggacacatgtagggatctgcccgtgaacctcgacccctggctcctgagtctggcagtgggtgcagtggcagctcctgtctgtgagggccccagaggctggcagcaggatgcctccgtggaaaattcccttaacgcctttgcctctgcagctgttcctccgggatgatctctttgggggatcatgctcagatatttgtctcaaagagtcccaggccaaacctcagggacctcagagcgtttagaaaaataacacctctgtgagcttggtccaggcagatcccatgcagagaggagtttgtccccttccagtccccgaggtcctggctattgccagcatggagtgacctgtgtcacctctgagtgccaggcaagggttcagcagctgacgactcagcttctgcaggatgctggcagcatagccagcgagatagttggaagccgtcagggcacagggaaggggccgagggtgccctgagtgtgcatggggggcagccctgctgcagtccaagcctttgattcccaagctatgtgcacagtttcctctggactctgccatgtggcccagccacccatacctggaataggggctaagccaagctgctctctcctccaaagggaggcagcctgtgtgctttgtccgtttgcctttgcagagacct

SEQ ID NO: 70216 - DNA, 662 bp, Homo sapiens
tgggctggggcggggaaggtgggcagcagaaaagagaaagaggggtcacttggttgtggaatttagatcttggttcatgctgcatttttaggaagcatgaagcagggatctgtttttctgaacccacagggaggattcagtggcataaatggaattactggggattcattagattttgcagttctgctgctgggcttgttcttgggactcagcttcctgtcttctgcacaaaatcccctgggctttgttgtcatcagtgatgagtcctcaggccccaagtcccaacccccactcccccgcctcaaccctcacccccgctgagtcaccagccgcagagccagctcttagggcagctgaagcctctctgctttctacagctgagatctggtgtgggcaccttgaacagaagattacagccggggccactgggaggcagccacgactgctgcttggctgctgcttcttggtgtcttcactgagaggggactgggagccgtcagtgcagtgctcagcagaccttactgagagagcgggagaaagctgcaagcatcctgaaagcaggggcagcagcacagcctgttcctcttcagagctgcagcagggagcctcttcagaaaacttctgggcagcttccttgggtcctggggactttttttttgaga

SEQ ID NO: 70217 - DNA, 611 bp, Homo sapiens
ttacaggcatgagccaccacacccagcctccaaaaaaaattttttttaattagctgaatgtgaaaaaaaaattagctgaatgtggtggcgtgtggcgtgtggctgtggtcccagctacttgggaggctgaggcaggaggatcacttgaacccaggatactgaggtcacagtgagctatgatcgtactactgcactgtagcctgggtgacagagcgagactccatctcaaacaaaacagaacaaaaaaaccaagtatttacagagacatgagtcatcgagaggctatctaaaccgagataagctgcagtgcagtgatgacagtttctttccacttccccggaggggctcatggctcagcagatcagctgcaggaaagagagaaacatcgtctctccgtgcgcctttccttgtatattaatctgcgatcctgctacacatgccactgtcagtcaggccatgctacgaagcctggggagaacagggcaagatttccgaggcctggccggaggcaacaggcacatagaaaaggggtatggggtccggaaggtgcagagtaaatgtgtgcgtggggcaagattcccccagggatggctacaggcacagttgcctct

SEQ ID NO: 70218 - DNA, 485 bp, Homo sapiens
acaattaaaaaaaaaaaaaccaagttggaaaactggctatattctttgtaagcattactttgggctaaataacctcttagaggatataaaaccacaaggtaaatataaaaacattttatacccagaaaaccttgttacctgcaacaaacccaactaccagatcttttccagtggtagaatgttgacctttgacccagagtgctttgaggctattaaaagtgtagaaatagacaaaattggagcagcagagactggaaatcactggaaaccaccctcgatatggtgccaggctaggggaaaaacacaataagcaaagtaaaggtcatggacaaattagaaattggcagagaaatcctaggaaaggctgaccatcattcacatggtctcaagcttcactcctacacgaatacaagggactccaaactgtacacacacctcacattctgaaggatgtccaaatcaagaaatctattctagcactaatg

SEQ ID NO: 70219 - DNA, 776 bp, Homo sapiens
atataaaaaccacaaacatatatttagggatgaaactatatacatgaaacttccattttggtttatggttctcaatccagatgcatacccactggtatagatttacaggcataaaatcaagtttcagactgctgatctaataatggttacaaaaaaaattaactaattaattagttaattattttagagacagtgtcttgctatgtcatctaggctccagtgcagtggcgagatcatagttcactgtaaccttgaactcctgggctcaagcaattttcctgccttagcattccaagtatttaggactacagatgtgtgtcaccacacccagataattttattttttgtaaagacagagtctcactatatttacccaggctgacctcaaactcctggcctcaagtgattctctggcctcaacttcccaaagtgcaggagtactaggtgtgagccactgcacctggcttcatacagtattttaatcatgaggtagaggttgcagtaagccaagatcgtgccactgcactccagcctgggtgacaaagcgagagtctgcctcaaaaaaaaaaaaaaaaattttgaataaaggccaggcatgatggctcacgcctgtaatcaattccagcactctgggaggccaaggtgggcagatcatgaggtcaggagtttgataccaccctgaccaacatggtgaaatcccctctctactaaaaatgcaaaaaaattagctgggcctggtggcacatgcctgtaatcccagctacttgggaagctga

SEQ ID NO: 70220 - DNA, 1311 bp, Homo sapiens
aaaatgtagccgggtgtggtggctcacacctgcagtcccagctactcaggaagctgaggtgggcggatcgctggagcccgggagatcgaggctgcagtgagtcgtgatcgcgccactgcactccagcttgggcaacagagcaagaccctgtccggaaaaaaaaaaaaaaaaaaaaggatctatcttctcctgccaataacggtgcccagagctatcctactaggtattgccacttgcccgcggcaagcgtgaagacaggctgtagggaagcatgtgactaagcaacacggcttcacacctacgttctcctccgggccagtaaagcaaagtgtgtgagtgtgcggtggtagcctgaccttaaacttcccacggcaaagatgcggaccctgagcgggcacgtgtgaacacggctctctaccccgcagtctctaggagaccaggaggtggcggagtctcggcccttaccccgaattcctccaacaactttccgccaatggcccattcctctctgccccacagtcatgacagtggaccccaacccacactacctccctctcagacccatccctcaggcatatcccgggactggcccccgagaagccttataacccgttgcggcccgggcgtaaagaccccgtctcaccacggctccggccacggcgtggaccaggctttcgtaggacagcacggaagccattggtgcggctcctcgaagacccagccacacttttcccacagatgccgcagccagtggagttaggaaaggagcaccggagctcagggtgtgagagtcgcaatccccgccctctcaaacccgcccgcctgccctagaaccacttccgggtcgcggggcgggaaagcgggggggggggggcggctaagaacgcccctgaacgctgattggcccctgtgggcgcggggcgggacagcgaggtgttcgcggggctgggctccaaggcgcaaggcggcctgacaccaggtacccggctcccggttcctccgacgttctctggcgttcccgggccctgaccagttcctccatctcagaagtcttaatggccttcttttactctggtgacaaagatggggaaactcaatgagactccagtctccctgtttctctgcgcctgagctcttttctattctgaaagtcacattttggccaagaggaaaaaaactcacttgtggacttggaaacttcttcctccagaaaaacccttgagtgtggtgggaagagatgttgagcatcaggagcccaaaatacaagacgcgagtgggagcctccccctagttggcaactatggaagtcat

SEQ ID NO: 70221 - DNA, 1504 bp, Homo sapiens
ggtgatctaggttgcttttccttcagcaagggctttatttatcagaaggacattacgcttgacctccaaatttggctgacaatttactgatgagattcataacctttgggttgctctggtattttgacatatttgctgggttctgagccacatcctggaaagccaccataacttctggatcctgaaaagaaagggttcattagtatttaaaaagtgtcctactgggtcagtaagtttattatcctaaattccatctcttatttagacctgtaatttggtgatagttaagttaaatggggtttagatgagtgcttgaagtatcaaaatcaagctgaattaagtcatttgaactgtatgatgaaaaaagcacaattttgatacaaagaaaaggacaactggatataattgccgattgctaagtatttcctagttttaaaaatttaagttactcactctgcataaagaaaataaatgtcactcttgcataattagctatttggtaactgtgataaataaaaaatagctatgagagtaacctttgtctccacacagaattatgaaagaattgccttaatgatacaaagtccaaagtttttcttccaagtcttacctgcatggctgcaagaacctctggatcactaagaatttcattgagtccaggcattccagccattccaggcatgccccctcccattccaggcattcctccgggaaaattaccaggcattcccccaggaaagccacctgtaataaaaaatgaatagacactaatcatactcccaaatattctgacacagtatttcatccacaaaaagtacaggttcaaagaatatgggtgccactaagcacaaagtagtctgaagagtctgaaaattctaaccagactgcaacaagacataagttatagcttctaattatctctttaaaaacaaggctgtaaatcagactttgctacctcctggattaacttttttctagtaataacactgttttttatttttgtttgttttgagacggagtcttgctctgtcgcccaggctagaatgcagtggtgccatcttggctgactgccacctctgcctcccgggtttaagcaattctcctgcctcagccttctgagtagttgagactacaggcacgcaccactatgcctaatttttatatttttataaatatattttttatttttataaatatgttttatatttttatatcaagttggccgggccgctcttgaactcctgaccccaggtgacctgcctgcctccctcaacctcccaaagtgctgggattaccggtgtgagccaccatgctcagcaacttttttctagtaataacactgttaaaaaagactaatctcgccttaaaagcaaagagtcatctaacagttccttagataattataaattgtataattatcttagattataaagctagtcattttgatcatctttcaactctccattcttgaatatttgtctgtttcaatttaaaattaattcat

SEQ ID NO: 70222 - DNA, 2134 bp, Homo sapiens
tatcctggaaacatgccaggccttaagaaattatttttctcagacgtgtttggagtgataacactgccaagtaacggaggtataataagtgattctcaagataattaatcctacgcagctacaaacgctgtaaggtaaaaacaatcatttttacagttatcatttttattcttactagttttgtaacttttaacttactagtgttatattattataacacgacgtaaaggaatagtgcgtaaaggaactgctatgtaccaatgagacctgagcagggcacacaagactgaaagaaaaacaaccccacgcaaaatctaagtcttgcagttttcactcctcgcgtctccagtgtccacgcatccgcagtcctgtttttgtatttcgcccaagatacacccctgggcaacctcagggtgcgaggaacccagctctgcctcctgctccccgcggctcctgtactacccaaggctcgcgatcttccatgacccctcgaagttgcctccctttcccgggcaaagaaggggcagcgaccccgcctcgcccgccggaccgagccaggtccagcctggctcccccctggggccgtgcttcccccgcccccaacggtcctcaggcctgggtctcacctctccacccactccctcaggaagcgcatttcctcggtgtgcagaacgctcggatcctgcttacacattttcacaaaggcccgaagctcgttcactttgcgggggtccatggtagggaggtggtgggcgaaactgggggggctacggcccggttccaggcccaggcgctggctcggcgtgaccgcgcagaagggggcggctgccgcaagacagaacagactagaacctccccggccgctggctcctcccacccaacggtctcgtgacctcgggtcctccgcctgctcattcctactccctctgcgctgctcctgcgcgctccctagaatcttctagaagcgtggctgttcgtgctgttgcctgcctccctgcgcatacattctcatattcttaactaggaaccagctccctggatggggcaaccccagaaatgggcgacttcaaggaggcgggagataacatcccctccagggggcgacgtccaagagcatattgtgtggctgcgtgcactgagtagagctcaacgcccgggacctaaaaaaaaaaaaaaaaaagggcgtggagccggagggtcggtcccagctcggggcatgacgtcacaacctgcgccgccgcgcaaggaaggcccgcgagccgcctccgccggaaggggaggtgcggctggcccggtttcctggcgacgcggccctgcaggcggttgcgttccccgtcgttaccctctttctcttcccgacgcgtgagttaggccgtaatgccttggctgctctcagcccccaagctggttcccgctgtagcaaacgtccgcggcctctcaggttagactcttctcccacggtctcctcccatggtgtcccctggagggacccaagttggtctcaggcgatccctggttcggctgacccttctcctggtggggcctccgctccccaaccctctgtgctccgcggatttcttctataccggctgctcctggaaaggggtgggcccagtgtgttctctaccgttgaggtattttgtgaagccgaaatgactgcagagagaaaagtgtgccatcccccagaggggctgtcttccaagttactcggactccgaagttgtggcaattatcacacttaagtgacaaagtgtctcacatcaagtagctcttgtttctgttaggcgtgagagcttgctccagaatatacacgaagcatgtttagtaacaaattctttcagcagctcctcttaggagaggtaactgtttcgaaatacttctggggcgttctgtgtctgaaagtcctgtttgcaaagacaagacgaaggataaggagaataattttttgtagggtgtcctctattgcgagcaattaatctgatgaacataaagcttaatcagtgaaaactgaatcaccttccttgcaggcggatctgccattggatcgtatttcagttttttgggtcaatatatgaacaatgtgtgaaccagaacgtatggtatttgacatcaaagctatgtcttggcatatgtt

SEQ ID NO: 70223 - DNA, 2474 bp, Homo sapiens
gcgggcgcctgtaatctcagctactcgggaggctgaggcaggagaatcgcttgaatcctggaggcggaggttgcagtgggccgaaatcgcgccattacactccagcctgggcaacaagagttaaaaaagaatgcctcacaaaaattcaagaaatacagcgactgcagatgggtcggtttcactacagcacaagcagcggaaaaaggacacagatcggggagaaatcaccctacaaagatgacaactgaggaatgcggagtggggactgacacacgttacggtgaaaccgtgcaccacgaccaaaggcggtcctaggactgcgactatgtgggcgcagaggccaccccccaggcttggcgggcgagtaaaggcagggctgggggcctgctcagtgtggccttagggaggaacttcgggggtctcctctctccccatcgaatccctgagcagttcccgaacagaaatcggagaccagacggtgcctgggccccagccctcccacggggactgcaccttgggcctggctcggaagcgggtcagagtctgcgaaagaccagcgaggactcttgggtttcggggcaggccgcgggcgcccacccacgccagcaccgggagccgcgcggcgactcggcgagcccggcaggcaggacaggactgcggcgcaggtctggctcaggcggaggaagcagccgccgccccagctgacggagtgcggccgggggcttcccagaggaggcggcgacgtcgagccctttcgaacgtttccacccggctagctcacgtagcctcggccccgcccggccccgcccggccccgccccacccactccggccaccgccccctccccggcctacagttcgcgggtggggcgacctgcgacagcccctttaagaggcgtggtcacgtgctccgcccccacctccgcctcgcgcgccagtaaggggtggggtgcgggaggaggtgccggggaggtggggggagcgaagtgtgcgctgctgcgcaggcgcggtggtcggacgacagaccgtgtgtttccaaaatggcggcagcgatggatgtggataccccgagcggcaccaacagcggcgcgggcaagaagcgctttgaagtgaaaaaggttgggtctcgccagcgccttcctcagggaagctagagaggcgcggatctggctggcaggcccgaggatggtcgaggcgcggagtaaagggtttcatttcagggcgttcctgggaccgggtaccacgaaaggaagccggggggcgggtcttagagttgatcggcgtgacggcggcccactgttgggggaagtgttggtttcgctgtgaggctaaggggccaatcacagagctgcttattgagatacgcggggttgcgacttggcggcgggagccaagcgcttgagctgtcactggagtggttgagaggtgggggaaggacagggtagggtggggtggggtgggtggaatggggagtcgaagcgaatgcggcggtggaggatggggcagtgcggcgagagcctggaacctgaggtcctaccgcattagaggcctctgaggaccccccttggtgatcttgctccgcccctttttgaagcttggggtcctctcacttggaggggtcctctcacttggagggatcctcgctgaaccgaggcctcacactgcctggttagagtctggagtgtaatgcttggctcttctgagacgtctgttggcttttcacacaaccaccccactcttgggttctctgtcacgtccagaatctcccccttccaaaataataataaaaagcatggtggaacttgttaagaaaatccgagcccaaatcctgtggcagttagggagggttgagtactagtcgcgaacgacttggtaagcgtgggaaagcaaaaatggaacgtgtctttttgcatgaaatgccttttagtggtttgccacagtttgggagaacagtatcgattctcacctaacatgaaagctgttcaaaatggagattctaaaatagggaagatattcctagaacatctggctaaacactgacaatatcccccgtcctagtgctttttggtgtctcattgtggccactgctgctcagttacagccagcagccatattgaaaaataatagaagtaggggcttttcctccaccttgaagctgtgatgtgaaaagtggtaaagaagttactaggcactgagaatggggtttgaaagcgaagaaggtttgggagtatttgtaattgaggaagccagagttgaatgaatgaaattctgttaaactcttactggaattattatcttaatagaagagtctaaacatataaaagttgagaacatcagtttattttatggtaagaatcaaaattctagtgaattgtagaatttgttatgaagtaatctaagatttaagtgatgaccttgttctgtgtactgacacgggtatttaattatccagcttatcccatgattacccatttt

SEQ ID NO: 70224 - DNA, 1806 bp, Homo sapiens
ggcagcatccgccggcaaagggctggcgccgaagcctcagaatattcgatggaagaagaatgaaaggagagtgactgggtctgtcccacattgtgcattacagcacattttctaggtttgtgtgtgcatttccctcaggggcaagggggcccagagacggggctcttcatttgatgagctcaatgagtgccaggcacttacgtgtcatttaaaattgccgtttccattataccgggaaactgaggctcagagaggtgacttgatgaggtcgcacagatggtgggtggacgcgctgcctcaagcagtgtcctgtatactctgtccctgtgccttcgaacccctacccagtataaagggattgcggtggggagaggctcctcagtctgtgatagaagcaatgaaggactcaaccgtcctgccccgccccgcccggcctcctgcttctcccggtttccctgccgcaggccccgctcaacccccgctctgcctgcgtcccggccctcctttgccgcgcccagctccgaaatgctgcggcgggggctcggcgggggctgggcgggggccgcagggccacaagctcccccgcccccagcacccacttatgtcccctctgctctccaaacgggtcccagggccacacctgtctcctgatcacgacctggccggagccgggacatgggcgccatttccgcagcccagctcgggtcgcgtcggttttgaaatcagatagtcttttctcccgactccaagggcgtctgccccgcccagggctgggccggagggggagggggcggacaccccgggggcgcgcgccgctgggggaaggaggggccccgaacttggaaaaaagggaactcgcacggaaaaatcaaatccaagtggtctgcgttcacccctgcttgggagacacaaaggaagggcgcgcggggcggcggaggcgcggggctccggagctggctacgcccgcggctcccgcgcccgggccgcttccgcagaggacgacaatccgggccgcctgggctggcttcggccacacccagaggccgcacctgggccggcgccctctctcggcgcagcctcgcgcgcccggtccccgccgcgctcgcgtcccggggggcgagtgggtccagatcccacgaaccccagccgggacccgccctcccaagctccggggccaaggtgggccacctctctctcgggctcttctctttctgatcttttttatggcctaaactcgagatctccccaccctagtgcccccaccctgccacccaacccaaggactgagtctggaggtcgaccctgaaccttccctgatcctctacgacgttccgcggccgcagtcctcccgggccccagggctgcaggtcacgtgcccgcggtgggggcagggagggacgcgcagcggagtctccgggctgcacgtgcaaggcctcggggagggtggagctctggcttcccgagctgcgctcgctcccggcttccgccgaggtgcccggggcgccggcctggagcaggcgggggtctgggtgcctgggctgcggtcgggagcgcctccgaagaagcactcggtgcctgccccgctgggagcgcaagcattgttacctatcagcgccgcacttaacagttgttaatagcagtaagccctcactaaattgtcactgctggcagaccgcagtaactcggtctgacctcaagcacccgataaaagagttcttgtccgtaaagtcagttacgtaggagttggtaatctcgggttttcattatggagaattttgaacataaacaaaagtcaggatggtaaag

SEQ ID NO: 70225 - DNA, 3231 bp, Homo sapiens
tagactttatattccagcatttcctctcaccattacatttttgcttttttccatccttacattacctttaccacatttttgtttttcccataattacattagataaggcaatggctagacgtggtcttttactaacttgttctattgggagcggacgagaaaaaaaaaaaagacaaaccctagaaatgtcttcaggtcccagccatgtttaggaaaatacttgaaggcttctgcggtgagagtgctacctggtaagggcgtatggacacacgtggagggcaagaaatgaatttgggtctggtgccgaaacatctttccactgctgtgattttgttttctggtcagagtaataatgctcgttgtaaaataaataaataaataatacataaaaaggaaaaggaaaattcagagaaaatgaaaacaactcgtaatcaacgtgctttttggatgtgaactgctccctttgggagggcaatggagaagtgaggacgcactgggtatctggcccggaacagccggcagtgggtacaccctgcctggtgaattcgaccggggttttgggggacccgccacccaagggccgaagagcagggccgccctacgggcgctcccatttggccacctgagtggcgacttggcgccttcctcggagcagctccggggttccgtcgtcccggttcccactggtcccttacgcagagaccaaaggcaggaaccttccctcgtaactatccaccgactgaaaatagattctgagtccgcccccgcccctccccccttaaaatcctccccactcttaaaatcctcccctttaaagggagccacagggtgacgccgggggagtttgcggaagcgctaaccgcgttggggcctagggcggatcccgtgattgggacaggccccgcccccggctccacttcccccattgtgtgagcggctcgggcctaggccccgcccccctccggaggcccggccactccccttttccacccccccttggctcatttccggccgccgccgctaccgctagcctgtaaggaggattcggcagagggaagaaacaacagccgccatcttgtttgtgtgctaggctgggggggagagagggcgagagagagcgggcgagagtgggcaagcaggacgccgggctgagtgctaactgcgggagccagagagtgcggaggggagtcgggtcggagagaggcggcaggggccgagacagtggcagggggcccggggcgcacgggctgaggcgacccccagccccctcccgtccgcacacacccccaccgcggtccagcagccgggccggcgtcgacgcctaggggggaccattacataaccccgcgccccgcggcgtcttctcccgccgccgcgggcggccccgaacggagccccggggggcgggcgctcccagcacctggccgccggcggtgggggccgtagcagcggccgtatttatttattttccgcgggaaaggaaggcgaaggaggggagcgcggcgcgaggaggggccgcctgcgccgccgccggagcggggcctcctcggtgggctccgcgtcggcgcgggcgtgcgggcggcgctgctcggcccggccccctcggccctctggtccggccagctccgctcccggcgtccttgccgcgcctccgccggccgccgcgcgatgtgaggcggcggcgccagcctggctctcggctcgggcgagttctctgcggccattaggggccggtgcggcggcggcggcgcggagcgcggcggcaggaggagggttcggagggtgggggcgcaggcccgggagggggcaccgggaggaggtgagtgtctcttgtcgcctcctcctctccccccttttcgcccccgcctccttgtggcgatgagaaggaggaggacagcgccgaggaggaagaggttgatggcggcggcggagctccgagagacctcggctgggcaggggccggccgtggcgggccggggactgcgcctctagagccgcgagttctcgggaattcgccgcagcggacgcgctcggcgaatttgtgctcttgtgccctcctccgggcttgggcccaggcccggcccctcgcacttgcccttaccttttctatcgagtccgcatccctctccagccactgcgacccggcgaagagaaaaaggaacttcccccaccccctcgggtgccgtcggagccccccagcccacccctgggtgcggcgcggggaccccgggccgaagaagagatttcctgaggattctggttttcctcgcttgtatctccgaaagaattaaaaatggccgagaatgtggtggaaccggggccgccttcagccaagcggcctaaactctcatctccggccctctcggcgtccgccagcgatggcacaggttagtttcggcagccccggccttccacgttccctttaatcttttctactcggtgcgcctttattcttccattttttttttcttcctctctctctagttccctgccccttaattaattttaaaggtatttgaatgagctggtcgaagacgtccagtagcccaaccattttctttgcctcctaatacattgattgcaacactatgtcatatcggtgtgtgttctggaattagagctcgtaagtgggtgctatatagaaatggcctgtattgttgctctcatgcaatttaatttgggaaatgccaatgcatttgtgtgtaagagctcctatgcaatttaagtttcattttttttgttcttggcaaatgaatttcgaatcctttctctttactgtacttactgtgtttcctctactttccactcttcgaaattttctctcctttgcagaatattttctgttgaggaatagggtgtaaaaaaatcttgattttgtgtgtgcgaggtccaagatttcaggttagaggtgaagtttaacaattcttttatcttacctaccattcttagcttttttttcctttttcttcttatttgctttaagaatcaatatggagcgcagttcatttcacatctcccagttctttggtgtgagaccaaaatgtctgaaactctgggtttttaggttgggagaacaggggcatgttctttgcagtttgcagtcactttctcattttaggggaaataagataaacaattttgtggagttacgtacctggaaatcaaggttagaagttgaaagagttccaatcatgaactacaaacgtgaactgattgtacaaaagtttaaaa

SEQ ID NO: 70226 - DNA, 1403 bp, Homo sapiens
gagactccgtctcaaaaaaaaaaaaaaaaaaaaagagtaaggctctattgctactccctgatttaataaacgtctctgggacaaaatttcttcatctgtaaaaaaggtaaataaaaaaaacgcttacttggcaagttcattgtgacgaattatctacgacaccggaatggaaagtgctttacagattgcaaagcactccttacacatgagtaattagtgttcacaggtccagccacttttggggaggaggaaagtgtggtcttttagagaccaaacgtctttctaaagtcctgacagccaacgaagggctcggtgatctctgcgcttcaaactctgcccaattctcaaagcctggtttaagtacacttttccctcagcctaagggagtggcccaagggcaaaccgtcccgggttcgtgtcccacctctgcctcaaagattacaccctcttaggacaggtgcgtgtccctggtggcctgggctgccagctcgggaaggaggaggtggcaaccgcacccgggcggccgagtgcttaataatggcagttgccctgccagcccggtcacctgtcactccctcctccgacttctcccgcaccgcggccgcaatccagcccggacactctgagggctctctctgagctgggcacggtcctcgctgctcggccgagtgcagccccctcacctcagtgcgactgagacaaagcaagggtcccaccggcccctgtcccctccctaaggcgcgccctcagggcgggagacccacctcagccagccccccagctcagtggtccagaggctcgggtcccgcgctgacgcccagcgcctccctcctccacagccgtcactgaccgctcgctcgcctctagcctggaccccgctgtccagcagtcccggctggcccgcgccgcgctcctcccgctctggcagtcctggcactggtaggacgcccgcagccttccaccctagagggcgccgggcgggcacgcgctgggggcgacgggggtggggcgggggaggcggggcgacgcagcgcggggcggccggcggttggtgctcgcagcccgcgcgcccgccttcccggccacgtgacctttgggccccgcccagatcgggagttccgcgcggactcttggtgcgaccccgtcccactgagcgctcgggtcgggaccttcccggtgtccctgtggggcagagtcccgttgtgcagaagaggcgagctgaggcacggtggcaggcggggcgtccaagcagttagcgccgcgcctggccgctcgtccgcgcgggaaagcgttgtctcccttccttcggatggaattggaacggcagctctcgtagcgcccgaactgtgcggtccttgatttcactgctgtacccacagtgcgcagagcacaggggcacgcgg

SEQ ID NO: 70227 - DNA, 947 bp, Homo sapiens
gtgtcagctttgcctgttggctgctttgtgacctctgagacgctttccttcctggtgtgtttggaaatagcactgcttagtctagtctaggctggttcttcctgacccagcagtgccctggggctggaaaagccctacaccctacctgttccctgccccaggcaggacagcactgaagtcacagtgaacaaaaagaacctcctcctctgtaccccagcaccatggctctctgtagagcagctcgagggcatcttggtcaccatccctcattaggtcagttgctaccaaggcactgtgaaagcactgcagagctgcagcccatcagggtcagaaagggacacaggaagactcagttctctggacatgagtcttgtatgtgccacaggcagagggctgggagggggcggggagggcaggatgcctggggatcagagtgcagagcccatgaggagcacaggctgcacaccagcttccaggcccagctctggcacaaatgagtctgtgtaattctgggcaggcgtgacctctgggtcacttttccttagtctaaagtgcgttttgtgatttgcatcaactcattggcgttttggtggcaagaagtggcatgcccactgcaagccgtgtgccttccctctgtgtcctcctagggagagctgttgcctccctctgtgtcctcctagggagtcagggccaaggtgagcctggcagcgcaggcagtctcatctgccacctcccgactgactgagtgtgggggataacaccacaccttccctgtcctccactcaccagagcaggagggtgggtgggaagagccctgagccatagcaggcctgtgttctgacgtcgtttcagatggtggagagcatgaagtacccctttaggcagggcatgcggctggaagtggtggacaagtcccaggtgtcacgcactcgcatggctgtggtgga

SEQ ID NO: 70228 - DNA, 633 bp, Homo sapiens
atagtttttgtattttttagtagagatggggtttcaccatgttggccaagatggtcttgacctcttgacctcgtgatccgcccacctcggcctcctgaagtgctgggattacaggcgtgagccaccgcgcccagcctcggatggacattattgaactgacgcaactgggtcattgcccagctctggaaccacatgaatcaggaccaagccaagtcaggctcctgcttcctggggactttggaacctggcccaccacccaccaaggtctcacccctcctgccccatggccaaccttatctgctccacactgtcttcctttgatgggggttctcctggcactgggcctggaggctggtgtccgcttggcctttctggcagcccagcccgggcagtcttcaaagacagcagctgcagccttcaccctctggccacgggcattgggaggggtggcgcaggtggcccccacccgcaggttcagcccagtaagccacctgaagagaaaagagagctggggagctagctgtgctgattctgctccagtggcctggagcaggtgggcactgggtgtggggcagggttggtgcagaaggcagcacaaggccacaggcagcatgcattcattcgctcaacaag

SEQ ID NO: 70229 - DNA, 1178 bp, Homo sapiens
aaggcccgtgttctccccaggtccccaggtgccaggcggtccacagcgttgtcctgcaggtgcagggagaagaggctgggcagggcgcgcagggcagcccctggcacctgcaggaaacggttgcgttctaggtacaggtagccgaggcggggagccccttcaagggcagcagcgctgaggcctgcgagctggttgtcggagaggtacaggtagatcaggcggcccagcccggccagggcgcccgcttccagctccgcgatgccgcagtgctgcaggtgcagcgacaccaggtggcccaggccggggaaggccgctcggggcaccgaggggaagtggttccgcctcaggtccaggagctgggtgtcgctggggaagccgcggggcaccgcctgcaggccgcagccctcgcagctgctgtgccgggactcggggacgcacacgcaggcgcgagggcaaggcgcgactgcccgctcctccccggggccgcgcggagggccgcgcggaggggcgcggggcccggccacagcccgctcttccagctcttcctcttcctgcgccgcgtccccagggcagcgcaggtcccagggccgcagggcgtccagagcctcgccccgcaggcgccgcggcccctggcacgcgccgtccgagcgcacgcgcgcccgcgccagccactcgagtaggggccgcgcctggcagccgcaccacagcggattcccctgcagccgcagccggcgcagctggcccgggccctgcagcgggggcagggtgtctagctggttcccgcggaggtcgagggtgtgcaggcgcggacagtgtgcgaaggccctgggacccagggcctgcagggccccgccgtccagcagcagctcccgcaggccgggcagcgccagcccgtcctcctcgcccgcgtaggtgagcgggttgtggcccagctccagacgggccaggccgcgggcctgggacaagacaggcccgggcagagcctggagctcgttgtggtgtaggctgagccgtctcagggcgggcaggccagccagggcctcgggggccagcacgctgagcgcgttgtgcgacagccgcagccagcggacgcgcagtagcccctggaaggccatggcgggcaggtaaaccagggcgttgtgggccaggtttagcgtggccagcgcacccagtgcccc

SEQ ID NO: 70230 - DNA, 534 bp, Homo sapiens
tcaatatcattagtttcactgcaaaggaagaaactgaggcaagactctgggggactgggcaagtgcgggacgcagccaggaccaggcctgacaacacctctggcctgaagccagtgaacaggccaggatctgcgccaggccgggcatcccagaccatttggctgggagctgagggaagagggtccgtgcatgtcactacatagttaatcagtcaccttggacaagacccagggggcagactgaggcctgtgctggaggttgggcaacaagctgggaaaaggcattttgctctgaccaacaagggcaagaggcacatgcccaggcttaggatagcacaggggctgccagggatacagagggaactactctgaccagggggcaggaaggacacaaagggctcaggcgcagacgggggctggggccactggccaaacaagctctggacagcatgggcaaagctcggcactgcagcaacagcactgctatggaaaggggctcagggagagcacactgtgctggggtggggtggggtgg

SEQ ID NO: 70231 - DNA, 2643 bp, Homo sapiens
tcccagctacctgggatgtaaggtgggaggatcacttgagccccgtaggtggaggctacagtgagctgagatcttgctgctgtacttctggagaccctgtttcaaaaaataaattaaccagaaaccagcccagtgcaataactcacacctgtaattccaacattttgggaggctaggcgggaagatcactttagaccagggttcgagacaagcctgggcaacagaatgagaccctgtctccacagaaaaatttaaaaattagccaggtgtgatggcatctgtagtccccatgacttgggaggttgaggtgggaggatcgcttgagcccaggaagccgacgctgcagttcagcggtgatcgttccactacactccagcctgggtgacagaaggagaccgtctctaaaaagataaaaaaatttaaagaaaaaccaacaaaaaaattaacctgaaaccccagcatctcttgcagttctgagatgggacaatttgagggtaaaaggtggtggtgaagcctccagatagaatagggacagaacttctcagctgaacgggggcccattcctcagtccaagagagagcgagacagagatgcacccctccacactcactttataaaccaagaaactggagcacagaaacgtaaattgatttgtccaaggtcagcaaaggatcagcgccagagcaaaagcaaagggctaatagagaaacatcctctccccgctccgcagcaacgtcagagactttctgaggtgagatgcatgctcctgcaaagcgtcagcagtgactcacatcgattccagggacagcggcgccagcccggggcccccgcgggcgtgggcctgctgggaggtggctctgcgggagcgacgcgcgaatacaggccgcaaatgataggcgggcggcgcaggagccccatctggaatccccggcggactcgcaccgcctccggttgacaacaatgctaatatgagacgccactgctagcagctgcaggctgagctgctctggcgagtcagacgccctttaagcctcagtttccccatttgtgaaaggagccagcgccgctcaacaaccccactcccaccgccacccctggggcgctcggccgtcgaaggctaagtgaagaaggccgagggggcaggcagaaggcgcacacgggcgccacgccctcctcgccccgcacccctgttccaggcaggtgacggggaaaggaaagggaccctgactctaccgtaaacaggcggcgccgccgcgtggggggaatcgagcgcgcgcctccgccctctggggcggggacggatttagggtccgggtcaggccggggtcgccacctccggatccagcggtccagatgtccagccggctagtctgttagctctctcgagctcccggcctcacgcgcttccagcaccacctgctctccgcaccgcggcggatgatggcggaggaggaggattttgaaagccggcagtttctttgcttcgatttgatttgttcgaggccccggccggcttgccctcgccccgctcgcgcggcctctcgggtagagtagtccggttccccatctgggagcgcgatggggcgcgcaccgcgaactacccgtcccatggcgcaccgcgcgcagagcgtcctccaccgccctcctcttcgccctcccctggtggcttctggctctttctcgcagagaccgcagggaggtgttcagccgggagcgcccagagactacaattcccagaatgcgttgcacccaggtccctcagctcttccggaaaggttttgttcgcgtaactttgttgataacaggtactgctggctgctgggtctcttgggcaagacacaggtatccatttcccgaaagaaaagactcttttccgtcccatgaaactgaaagggcattcgaaggcttccacataaatatgcacaaattacctgataattaaaaaggggaaatagtaactatcgtagagaagctccgcagacaccacttgaacggccacgttaacatcaacagcaggacaagctgacattcatcgcacgctttctgtgtgatgcactgagaaaaacacggcgtcaccgtccggtctataatgcatgaccttagtctaatcatgagaaacccaagctgagggacatggtacagaataactgatctgtacccttccggaaatgtctgtattatgtaagacaaagaaaaactgaggaactgttgccgattacaggaaacgaaaaagacaactgaatgcaagacatggtcctggatcggatcctgggtggggattgctataaaggacaatactgaaacagcaaaacttgactatattagataatagtattgtatcaatgttaaatttattaattttgattatggtacagggttatgtaagagactgcccttgttcttggaaaaaaatgctgaaataattagggacaaaaaggacatgatgtctgcaacctttatggttaaaagaaatatacctatacatatacatagagaaagcagagacacaaatgtggcaaaatgttaatcagttaatctggttgaagaatatgggagttctttgaacatttttgcaacttttctgtaggtgtgaatttaagcataaaaacacaaacagcgttttttttttgttttttttttttg

SEQ ID NO: 70232 - DNA, 1754 bp, Homo sapiens
ctgaggtcaggagtttgagaccagcctgaccaaaatggagaaaccccgtctctactaaaaatataaaattagctgggcatggtgacgcatgcctggaatcccagctactcgggaggctgaggcagaagaatcgcttgaacccgggaggcggaggttgcagtgagccgagacgcaccattgcactccagcctgggcaacaagagcgaaactccgtctctaaataaataaataaattaattaattaattaacagatcatgccatatccttttacacacagctcatttaatcttcaccaccacaagggaagtgggcatcattaccacccttcccagcacagagatgagaaaactgaagctctagacagagtgtaactctcccagttctcaaagttcctgagatgtggatcctctttccaccttccctctcctttttacctacaaggcccatgtcaaatgctacttcatgagtctctccctcctgcaggtgcccacagcaagatgcaaagccccacagcagttggcctgggactctggggctctttgacagagttaacactgttcttggcagtttcctcctcagcctgggagggtctccagagcagacgctgtatccatctgggcagtatcttctctgggcctggcctgtcataggtgcttcaggtttccccatttgaaccagataccagtcgggttaccggatgtttgcttaaaatgagtcataggcttcctgctattcctgtgctgcttccagctaggactgatcgaatcagtctggattttccttggggtgatccgcaggctcccttttccaattttacttcttgagactttccttggccctcacacagagacctcccaaagggaagaggaaggtgggcaggggaacatcttagctgatcccgtcctcatccagctgataggacattgggttttcggaactggaagggaattcttagacaacagaaattcagtggccttcaaggacctgggaggtaacaggaagtcatggggcttgtcggggcttggtggggcttggggggagttagagagtggatgttctgcctgaaggtgttcacattcgaagctaaaaatcacaaactcagcctgacagcaccccctagcaatctggattctgtcactcctatatcctgattttttttttttttttttttgagatggagtttcactctgttgctcaggctggagtgcagtggtgcgatctcagctcactgcaacctccgcctcccaggttcaagtgattcttctgcctcagcctcccgagtagctgggactacaggtgcacgccaccacgcccggctaatttttgtatttttagtagagacggtttcaccatattggccaggatggtctcaaactcctgacctggtgatccacttacctcggcctcccaaagtgctgggagtacagtacaggcgtgagccactgtggccggcctcctgaatctatcttaaacctctttacaaatggggagactggggtttgaaaaggaacagggggtttgcccaagggtgcccagtgaatcagaagaatcaagaatcatcactgtttctggccgggcacagtggctcatgcctgtaatcccagcacttcgggagggcgaggcaggtggatcatctgacgtcaggaattcgagaccagcctggccaacatggtgaaaccctgtctctactaaaaatacaaaaaattagctgggcatggtggcagacacctgtaatcccagctactcgggaggc

SEQ ID NO: 70233 - DNA, 1249 bp, Homo sapiens
tattattattattacttttttttttttttttttgagatggagtctcactctgtcacccaggctggagtgcaatggcacaatcaaggctcactgtaacctctgcctcccgggttcaaacgattctcctgcctaagactcccgagtagctgggattacaggttcccaccaccatgcccagcttatttttgcatttttagtagagatggggtttcactgtgttgtccaggctagtctcaaactcctgactcaggtgatccacccaccttggcttcccaaagtgctgggattacaggtgtgagccaccatttccggccttctagggttgttttcaacatatacacttcacttgtgagtgcgaggtgagtttaagggggaatcaggagaagcagagagtgttccaggcctttctctgttgtgcagcctttttttgttgtttttgtaaagaatgtttcaaagacaaaagcaggctgcctctgattagtctggtttacttaactgagtgttttaaattccattctggtgcctgaaaacgaacttaattgccaattgtaaatggaataaataataatatttatgttggattcctgaaaacagaccaaggctgctgacttgccatttagtcagatcaaaaacaaatggctaaagtatgccagacatgtgaggaatgtggagggaaattcccaacacccaactgggtgctcgcctgcagcccctggagagagatgggtcagcccacctgcagggcaaggcagcctcccccagggtcccctccactggtgggagtgggttggctgcatcatctatgaaggacagtcgaaccacatctttctcaggactcaaaccaagggcatcccactagagcaactatttaaccttgataaataaccatcattacaataattcatttgttctacaaatagttatcaaacatctatgttccaataggcactgttccagctcctgaaaaatccagtgatgaaagagattgaaaaggatggtgtctatggaggagttttaaattctgctctaatgtttatggaggatttcccggtaccaaatggtttctggcagattatcttctcttttaataattccttcatcggctgggtgcggtggctcccgcctgtaatcccagcactttgggaggccgaggtgggcagatcacgaggtcaggagttcaagaccagcctgaccaatatggtgaaaccctgtctctactaaaaatacaaaaaaattagccaggcactgt

SEQ ID NO: 70234 - DNA, 2405 bp, Homo sapiens
aatcagtggatcctttctccttcctcataaattcccagttgcccatgctgatttctgaattgagcccaaatactctccctgaccgcaaaacccactgcagtggtccctacacccatcatgatgccaataaagtcggccttgtagtctttaacaagtgtcattcaatattttttttaacatcctatacataaaactccagccaagtgaggtcctgattcttctatgtgtctccggttcccatctatgagaagggcacaacgcaaccagggttttgggcagccttccatgaaagcacctggaagccggagaaggggggcggggggacttttgacacagatggggaagggcggaggcgctgggtttgagcagcatcagcccagaaatgcagaactgccaaaagaaacccccctaaaaggcaggacacttttaaagaaaataaaggtgaattccaggcatgagctttcgacggggaatggggcttccccgactcgcccccacgccccccgcccttctccccaggtgcgcagcccgcgccgcccaccccgggcgcggcgaggcgacgggagccgagctctctaggacccgaggaggaagagctgcagggagacagtgcctccagcgggtgctgccgcgagcggccagccgaggggctggaaatgaaagtaaagcgctccagagccacatggacggagctgccggggcggcggcgccgggagcaggatgcggccgcccgtaattaaatagcatttactcttattattactaataataataacgtaatcatacctctagtcatagcataccatttatcgggctcggcgcaggcccgcggggagcgcagcccggcggaggtgagtgcttggcgcggcccgagccccgcggggcagaggccggggacactgcgtccggagccgcccgcgcgcgagggttcggggacgcccgggccgggcagggctggggaagaggcgaagagagccctttccaggccggggccgcgcgccgggccacctggaaagtgggattttgcaaaaaataaatcgtctctaaaaccccatttgctcctttttggggatcccggtccccgtgccctgccccaaagtttaaaagttaccgtgtggccgggggcacctggcgctggggagacttggccgcccctgcagcccccaggaggtgtcttgaaattttcgtggggcctctctcttcggcgtccggagcttctggggtgtccagatgctttgccgaccccgcgcagggggtctcgggggctggcaggggcgtcgctggcagggccccccttccttttgtgttgtccttggccccgcagcacccggagttggaggggccgcggcgagggccggggagcggggccgcccgacgggccgcccctttcggctgcggcggccacgcgagcccggggatccggggcctgcagccgggcccgcgggaagggggcggcaggaaaggggggcgcggtctgggcctgctgggcaggggggcgtttccggtcgcaggatcagtctctggacttcgaggcctgtgggaggcccgcggccgtccagggagtgctagggggctgcggaccccggctctggcgcctggggacgggggcgccctgacggggctgggggcctgggagccgccgactccggcctcatacccccatcctgcccgctgcgaacctcagggcccccctccgggtttgctccctcctcctttcccctcctttctcctcaactctgtctgttttaggcgtttataaggcgcctggttggggggactttcacagacaaagccgtcttcccaggggggaaaataatcatataaaaacagctcactctgatagaacctgatggctgtattgccaacagggcattgacggggaagactagggggctagggccctgcgtggggagtctgggggctctaaaagggggctgggcctgagtggggagctggtgatcagcggttttatttctcgggttgctagctttggcatcagactttgaaccccaacttcttgccatattcctcagcatctgcagttcagcctgatgaaaatagcagaatgcagatccttgaattttcacacaaatgagataattatagtacatgtagcaactgtgttggacacaaaatgctggcagaatctttagttctactaccaatacttcctctacacacatacagccatcccctccgtggtggtcttctttccccgtgtccacctcccacagaagttggactgcaaggtggaaatgacacctggtcaacagttggatggagcatgtttgagaagtggggagacttaaggtgggaagaaagaacctgtccaggagggatgagatctgaggatgggagagagactttgttgtccctgagctgggataaagtttctgttctgtaga

SEQ ID NO: 70235 - DNA, 805 bp, Homo sapiens
ggagcatctctgtgtcatccctctccctccacaggctgaggaacgcagggcagggagcccaaagtcctgagtttcattcccaactcctgttcatgctggctgtatgatggaggcattattattttgtcattcttggcttctgtctccttttctgtgaaacggccgtactgatcctgtcgaatctgcatcaggggttgtagttatgatcatttaatagccttcagaatattcctgaatcttcttcactgtctgccttgatccaggcctgaaccactgcagtagcctcctaaccaatctcccagtatcctctcttgtcatacgtcctccctgcagtagccaaaaggatcttcttgcgaaataaataagctcctgtcactcttctgctgaaaactctcctgcagtttcctgacacacgcaaaacacagccctggctcccggcatggcctgtgagtggttctgagaccagcctcgcctgccccttgcactttgcctcccacgtggcttgcccttgcttgggtgttgcagccacggtggccttctgagttttcctggaacattatcagcttgttcccacctcagggccattgcctgtgccctgtcccctgctaggtaggtgccctcttaccccacctcctatcttccatggctggctacctatctctcttaaatgtcagcttcctcctaagggccttccctaaactcccagtctgctttttttttttttttttttttgagacggagtttcgctctgtcgcccaggctggagtgcagtggcgcgatctcgactcactgcaagctccgcctc

SEQ ID NO: 70236 - DNA, 932 bp, Homo sapiens
aggggccgcggggcagtgtgcccagcagccacatgaagcatttaggactggcgcatggtgagggctccatccacttgagctctctgtcactcttctgttgtcactgtcctcatttctggctcacatcagcctggttggtatttaatggacatccatcatgtccctgactagcttctttctggtcccagccaagcgccttggtcccgctgtacggcgatatgtgaatagtcacgaattgctaaggccttcccagtgtagccctttcatttcaccagcatgcagcctcacagctctggaggaggaaacggaggctttgagagtgcacccacggctctgcctctcccccaacctggcccctagcagtggcccgcccaggcctcctgaacttgctccttgtcctcccagcagccaggctggtctaaggacatgtcactcttgggtcaaaggcctccatcagccactgcccgtggccagtgggatgaagtccacattctgcaacaagacctacacgtgcccgtatccaccccctcacccctctgccctaaccattccccaaatgcactgaccctccctgattccgtcacacacgctgtgccctttgagcctagtcaccctctgctcctccttcaagcaccgcctgaatcttgggaagcccttctctgcggtgcttccccttgcaatcacccccactcccacccagggatctgccccactcctccaggtctgtggcctgtttgtccttgtgcgccaagagcctggcagagagatgggacaaggcagacttagagtgggaggaggagaaagaaaaacaggtcccacccccaggaaacagcagagctccaggttctgagccacctttcctctctccagatggcccagcccccagaaattttgttttggtttgtttttgttttatgagacagggtcttgct

SEQ ID NO: 70237 - DNA, 890 bp, Homo sapiens
tgtccggggcttcccccgcatcccttgttgtgggtatgatgtatttggcactgcttagccgtcccaagcgccgtgtccacggccccacgtctcaggcctcctccacatgcctttcctcggccctcctggcttcagtggccattgcgcttccctgcctgggtttgccctccccacagggcgctgtcctgtgtttctgggcttggaacctctcagctggactctgatcccagcagccccactgagctgttaattccctccccaaagctgtccctgaagaccccgcttggcctccggagtgaacttggcccctgtctccccacccagtcatagcatgttgagggcaggggcagtggcacgtctgtgtccgtagagcaagggctccaggtccgggttgctggcagggtttggtgccgctcagtccaaccctcatccctggcaccaccagcccttcccctagctcttccaggtcgggacttgtgccaaccccccacagggagcattggcctgggaatcatagttcatagccaggtgacagcctgtagttcataaagaacttgccattcctttttatcttttttttgacatgaagtaaccccctgcctcaggcattgggagtggtgggatcagagggagggaggagggtgaggaagggagccaaagcccaggtcacctgtgagctggaagcagagaggcaagaccacagaccctgggattcccttcctcactcctctgacccagggcagggcttgcagggacccagctgtccttccccagctagctgtgtggggtcccagctcacccccttcccaggtggccatgccaggtcccagcccttcccctccctgggcagatctgctttgacagtaaaccccggatcatcagcaaaggca

SEQ ID NO: 70238 - DNA, 393 bp, Homo sapiens
ttttttaagaccgtgggtctggggatgtggggcttgccatcttgcccaggcttatctgaaactcctgggctcaagcaatcctcccaccttggcctcccaaagtgcagcgattacaggcatgagccttgtcgtgtctctttttcatctcccttgatgaagaaacggttctttagtctttgccttgtgttgcattgaggtttttgaagagccagatgttttgtaaaaggtccatccctctgggctcgtgtgagtttcctcattccacagaggtgatgtcgtgttctcagctcacacatcaggggatgcgtcatctcagtgtgtcccttcactggtgacaatctaattaaactttcataacttgattcaaggtgcctccattgtaaacatttctct

SEQ ID NO: 70239 - DNA, 699 bp, Homo sapiens
gctgggcagtaatcaatttaatggtcctttaaaatgtctgtgtattaaaaatttaagaataccacactttaatattaaatattcataaggtctagtatcttgataataatgtagatgttttaataacaatttttgtccttcttaaaataaaatgaaagaaacttgcttcccttagcctttgttctagaaaataaacttgtgcactttgacctctgtccccgagatgtcactcctgttcctccccacctggtacttatatccaggggccttagctgctctgtcctcatgggacagacctggccggtactagctactctgaggaatgctaagcattccgaggggtgaggggcaggtctgtgtccctgtgtacacacggaggccagccgaccctggctccggcagcatctcactggcagcgacacgctgccacttgccacccttccctggctcatctgcagcttgcctgctctcagccttccacgtggggctgccagcggtgcccacacttccctacatttacgctgcagtgtgtgcccagctgggttccaggacccacctctgccctttctggaggtggctcttgcaggaaggcagggaccatgcctcgcctatgatgcccagtgtgatcccgactgcaaccctggcttctgtgaacccaagggagactgaagtcacatgggtccagtttcctcatcttta

SEQ ID NO: 70240 - DNA, 761 bp, Homo sapiens
ggtgaaggcatgatgtccgaccgcatccctgcatctgccaacacagggtgtcttgtgctcggctgcctgaggtgctgtccttgcctgtcatcctccttttctcttggagcctcaggtcccagcccgggatggtttccactgcgtgcctgggcctccagggcacctccatgctgatgcgtgcttgctgtgggcgtggagcttaccattctcacctggcagccccagttatggctcccagcctgggggagaacttccctttccaaagttagataacaggctgggctctctgtcagaggattggcgcgacagctccacgtgctgcagctggcgcagggccaggcccgccctgccaagcagcgggaagggaaggcctggctgcagccggagctggcaggtggccgagccgggggtggacgggcgggctgggactggtgctggccattggctgcctcaaggctcccaccccgcctgcctccctagcctgcggctggcggcccctgcctctccagctgcctctgaactccctggagcaagcacctcctgctgggctgtgtgagctgcgactggttctcagtggcccctgccatggacatgcctgaggtcctcaagtccctgctggagcactctctgccttggccagagaagagaacaggtaggagcacaggtgacctgcattgattggctgcccaggtactcgagggggcgagggggcagccacaggcacagtggcaggacaggcatctccaagccagggagggtct

SEQ ID NO: 70241 - DNA, 2989 bp, Homo sapiens
tccagcctgggcaacaacagcaaaactccgtctcaaaaaaaaaaaaaagaaaaaaagaaaagaaaagaaaagaaaataaaaagaaaaggaggcctgaaaaggtaaagcaatcgaggcatcagattcagaaaatgactgaggttcaattacagtggcagtgagagcttgaattttggaatcagacctatcatcctgtctctaccaccacccaaagtccttcaaatctcttgctttccaggcctggtcagctacccaacttctttttcctccttaccccgccgcaaaattatttttatttatttatttttttgacatggagtctccctctgtcgcccaggcttgactgcagtggcgcgatctcggctccctgaaacctccacctcccaggttcaaaccgattctcgtgcctcagcttccccagtacctgggattacaggcgccagccaccatgcccgtctaattatttctgtacttacagtagtgtcggagtttcgccctgttggccaggctggtctcgaactcctgacctcaggtgatccgccacctctgcctcccaaagtgccgggattacaggcgtgagtcaccaagcccagccccagcaaaattctgattgcatcagcttgataacttttagctggctgtgggtgtctggatcatgcatctaccccctgaaccaaggactatcactataccacccccccaacccctcctgctagaagggctgggccactgtagggatgctggataaacaagccaagctctctgccttccgggagttaagcggggagtctaatgttgcctgggtttgcagcggagtctgatctgtactataaagaggtacaaagttctgagcgctgtttaggagcagctttccatttgtgtaccgcgccacatattacatttttacggatttctgcggaactcccggggaggctttatattttaagagaggaggtggttctcccacaaaacgtggcatcggtacctggtgtcaaggaggtttttgttttctaggtaaaagaagggagagttctagaaaggaaaagaatttcacatctgtttgggactgtggagattctctagcccaacctcttaattttatggccgaggaaacaagctccagtgaagcaaccggactttcccaaggtcataagctagtaagtgggagggcggaaacatgtactcgggccctggctcaggtcagagcttcaggaatgctccctccacgctagtgttgatctggatgcgtgggcaacccgacaccccgctctagggcggccaagcctgctcaggccatccctacgacttggcaggtcgcggtccccggccctgccctcaggcgacctctgggtcgcgtgggagcagaagtgcgggctaagctcagcgtccctgccccgcgaccctgggcagagtccccagaacaaaaagacccgtccctcccttcccctcccgccccgccacagccccgcacgtgcggcgcctcgtgcaccgccccgggccccgcccccgccctccattggctgttcccgcgccttcctcctctgccccctccccccgcgaccagactcggctgcggctccacgtgacccgcggggggtggacacgccgcgcgagcaggagctcggataggtcgctttggccggcctggccgctccgagctccgcccctcttcggtggcgcgtcgggaaggttgcaagtcggggacaagagggagaggctgcggtggttggggagggcgggggttatgaagagggcggtgaagggggaacactggtaggagggaagggaccgcgccgaggaaggcccaccacaaagactccagcaggcgccaatcaggggacacaggggcggcggggcggggcctccgcgagggtcctcacctggccccgcacgtgtctatcttatcccggctgcccgaccaatcacggcccgaggatctgcgcctgcccctctcgcaggctggaccaatccagagcaacgatccggggaagctggcctggcctcatgaataattaatgtgccagagccggtccgcaggcggggtagcgatggaaggaggcgggggcgccattgggcgcctgcgcagtagctgcccgtgtcggcagctgcagcgggtcgcacggctccggcccatctcggggggcgggcgggggaggcgaggtgcgcgagccgagtccggggcacgatgtccgacgcgggcggcggaaagaagccgcctgtggacccgcaggcaggacccggtccggggccggggcgcgcagctggggaaaggggcctgtcggggtccttccccctggtcctgaagaagctgatggagaaccccccgcgcgaggcgcgcctcggtgagggcgggggggtggtccgcgcgggctgggggcggggcttatacaggggcggggcctcgtgagggcggggccggggaggcagtgggtcagggagcagtggtccagcggagggggatggggcctggatgaccaggagcctggaggacgaggccggggggctgaggacagagggtcaggggcgggctgagacggtgggtctggcgggagagggtggggagaggttttgaggaggcggaaggggatcgggagcagtcacttaaatgacgctccagggcccctcccccggggccacctgcatcggagtcactcgggatgcctgtttaaattgctggttcctgcgccccacccaatctgcggtcactgggacaggggtcttgcattttaaggagcaccccaccgcacccccattattttccaagtacaccaaagtttaggaagcgcaggcctagggtagcgaactgtcatcgtacgtggccttacccctcccggagggacctggcttcctccctgggtgtgagtagcgccagctactaggtccaacgggagcctttctgttgcggggcttctgctgagcgggtggggggggtgtgggcgagtagtgtgaggcgccttgggaggggagttttgggccaagcagagaaacg

SEQ ID NO: 70242 - DNA, 889 bp, Homo sapiens
taaaatgggtgtttcatcagcataaatttctaagctgaagatggggacagatcattagtctaaagtcactccagagggtaagtgtgtaacatctgtgatggacacacaccctgcccagggtgtgggtgaaggccaggatgctgagctaccccagcacccagtctatctctgaagttgtctgtgttgcattgatatgaagaaagacttgaagcttccagacaaaaagctgcttttaaaaaatgaattcaaagcaagctttcgtgacaactctaaggcccagacaggggctccaagtgttcacacagcccatctgatgatccttgccctcctgccatctgggcttcagactcccacttgggggcacagggaagctggggtccacctccaggggcccatctgtttacttctgcaggtccaaatccaatggccaagatcacttggccagtgacctggctccccacaacctctcagaagcctgagtgctgcaggttgggcaacagagtgtgtgtggagaggctttgaaggaccggcctggggctcagccgggatgtgggaagcagggcaggtagggtgagatggggtaggatgcgtgaggggtagggagctggccaaggcctgggagtataaaaataaatcctgttggcctggtgacatcattggagcacaggatgtccctggcaggggctgggagtggcagaggggacatggcagggggtagggcagagagggtcctgatctgcctgttctgtctctgggagctgtgtgtgtgtgtgtgtgtgtgtgtgtgcgcgcgtgtctgtgtttgagacagagccttgccctgttgtccaggctggagtgcggtgacacaaacttggctcactgcaacctctgcctcctggattcaagc

SEQ ID NO: 70243 - DNA, 2762 bp, Homo sapiens
ttctctgaccaaggctcccagtccatcctcgtctgccctgtctttccagcctgccccatcaaatccagtctgccgcagtccccacctgcacctgccatcgcctgctgtcagctagctctcttccctaaaaccctccctgttctcaaatcatctcaaagccttgaaggtagagcacatttcaaatgcagaggcccaggccccactctcaagaggcctggtgtggaactccggaattagctttgctcagcagcctccccgtggccatgcccttgctttaggggagcctcccggggcgacatggaagcgcccgatgatgtcctaacctggggaaacagggagagcaaacgcggtgtggtgggatgtgggtggccatgaccttaggtggcagctgcctcctgtcctctgttgctttcccaagggtgaggtgagccagcctcgaccaggggcctcctcggtcctgggaagcaggcggctgggccggcggcttcctgccttggcctcgcacttgcgcgccggctgtgtgccgctgggccgcggcctcctctaggccgagctctgtctgcggagacacagacggggacataaataacacccagcctcggccaggcacggtggctcacgcctgtaatcccagcactttgggaggccgaggtgggcagatcacctgaggtgaggagttcgagaccagcctgaccaatatggagaaaccccgtttctactaaaaatacaaaattagccgggcgtggtggcgcatgcctgtaattcccagctactcggcaggctgaggcaagagaatcgcttgaactcgggagggagaggttgcagtgagccgagatcgcgccacttccctccagcctgggcaacaaaagcgaaactccatcgcaaaaataaaaacaataaaaataacactcagcctcgccgcgtgaggtcggcgcgagaatcggcgggggcagccgcggggcctcgggggcggaagacgcactcagtggggaagagcgcgcggccgggccccagggcggaagtccctggtggaggtgaagtccgaggaggaggaagaggaggaggagaaaaaggaggaggagggctcagcggtctcgaagctgcggcccaggcggggcaggagatgtgaagatgccaggtccccggggagggcaaagggcgtgcgggccgtaagggacagcagagcggtcggggccgcccacccggcggacgccggaggcgagaggccccaccccggctcctctccacaccccgcgcggccttggggagtcagcccgggactcgctcccggcaggtgtcctaccctcccccggtcccggttggcgcggcggccggcacggcgggcgcggagggggccgcgctggtgtcaccaggagtgaacagcccagctattcagggagggggcgccccccgctgccctccgcgacccgcgctgacgtcgccgcgcagcccgttacgtaacccccctccccgcctttcctcgcgggcccggcctcctcctccagcgccgcctcgcctgccgcagcgcctccgcgttccgctttgcgcccaaagggaaactgaggcccttctccagcagagcacggcgggtagtgcccgcgggagtggctgtgaccgtcctcgttaggattcttgggtccctaggggagcccagactgcgaagggagccccagctccgcctgggggactcggcttcctcctgtctaccgcgttcttccttcctggcctggactctgggggctctggagtcttctgtggccgctccacccacatttgtgcctgggccaccatgtgccttaaattataaagtcgggcagtgacgctcagtaggggttggtttctccaccttcctctgggtgaccttaggcagattttgcctctccgaacctcagtgtccccacctgtctaaaatggccccttccttctagtgtggtggggaagaacagcagcatgtcgacacccggtgagtacttagccaggtagctgtgaactctccttatctaaccctccctgccaggggcctgccacagcgccagacctgggcctggttaggtggtgcccagctgggccagtcagctccctgtggaccttggcctttgccctgggagcatgcggtgcaggcctgccctgtggctcagcagctgcagaatggctggtgttctgtggcctggtgatggtggggagtgggtgcttccctgtcaccttccttacaagaccctgggagcacctgagggtcccttgcggtcccattcatggtcttactaaggtagctcacccagaacctgttttgagcatctaggaagagcaagctgtgagatgaggaaggtatctgcccaggccttctctgagctcctcagacactgggaacctcagtctcttcatctcttccttgggcatagatatcatacctccttcccttccctcctgcttggcccctgccagcatgagatgaaatgtcactttccctactcccacaaattggcttggacataagcccagggctttatgctcattttacctttttttttttttttttttttttttttgaggacagagtcttgctctgtcacccaggctggagtgcagtggtgcgacctcggttcactgcaaccgccacctcccgggttcaagcgattctcctgcctcggcctctctagtagctgggactataggtatgtaccaccacacccggctaatttttgtatttttagtagacatggggttttgccatgttggccaggctggtctttaactcttgacct

SEQ ID NO: 70244 - DNA, 1611 bp, Homo sapiens
atggcttgagctcaggagttttgagaccatcctggacaacatagggaaaccccttctctatcaaaaataaaaaaatcagccaggcgtggtagtgcagacctgtggtcccagctacttgggaggctgaggtaggaggatcgcttgaactcaggaagtcaaggctgcagtgagtcatgattgtgccactgcactctagcctgggtgacagagaaagaccctgtctcaagtcaataataaaataaataaataaaaaataaagcgagggtattaagacatgtctaccaggttgccgccagtatttgggacaatacagatgaaattcttggcacacaggatgctcttaataaataaatgttattattgcttattaatgtggcagtactagcatactttacccattaagcactttctgtgtgagggttactgtcctaaatgctgcgcatgcattcacgcccagtgaagatctgggtttcagaatggtgtcctggccaaggtcacacagccagcaaggtgctaagccagcatttgtaagattcggcattcttgtagaacttagctcaaatgatggcagttgttcatgatctggggaaactgaggcaagaggaagcgagtgactgctgaggttccctgcctccagaaagctggccctctccttgcccaaggtggcaggacaggttgtaagaacaagccctttgctcaggctgggccgcctgcctccagtcggctggctgcccgtgccctctgccagccactgttccctgttggccagccaagctgtggagcagtccaggacattgtgtccagagagagggccaagcaggcccatccccaactgtggcgctgacctccctccctgtccctctgggcctcgggccaacttggcctatccccagccctggtatgagcgggacagagctgccctcacggaagcagctctgagggcagtgcctcagctcctcccgccttactttgatccctagttaggaggggtgccccactccaagccctgctgtctctgcagagataccactagtcccaggggacagactccccaggatgctcctcaggacaagccagctgggctcctgagatgcctgtttttctgcccttggcatgtttgctctgcgtgtcccaaaatgccagctgagccaaggggagaggcccccttacacagagagtcagctgtgtgggagcccagtgcccaggtgagctggacacagccttgtctcccatctttatggataagaaaactgaactgcatagagagagtgggattcacacaaaaccacacagccatgagctgagactctgcgggaaggggctgaggagcggagaaaagtaagggtgggggaacagtctcagggaaaggggtggtggttcatgcctgtgatcccagtactttgggagaccaaggtggcaagatcccttgaacccaggagtttgagaccagcctgggcaccatggtgaaacctcatctctacaaaaattagggtggcgtggtggcacatacctgtaatcccagctactcagagggctgaggtggaaggatcacctgagcctgggaagttgaggttgcagtgagccatcatcccgccactgcactccagcctg

SEQ ID NO: 70245 - DNA, 4690 bp, Homo sapiens
gttcctcaggagctaggaaaactcgactcaacccaaacgtaggcggagaggcgggcggtgagggcccgctctgcactctgggaattgtagtcctcaaacacctccggaccaggcgatagcaggagtgacctactttccctgcacactacacttccctgagcactttgcgaaggcccaactggccgcaatacgcatgcccggtaaggggagccgaccgagggtcgaagagcccaggaaaagtttccgatgcacatgcgcgctgaggcgggtcggcgcccccctcccatcgcctaatacatttcatgtagattctacccaaaaggcctactccccgtattgtatggccccaccacatcctctaggctttacgagagcctaactttcccacctttcccttcatcgcctcccattactgatgaaactaggatctgcttctaatgagttttttctgggtgaagggggtgggctggcttagataaggtcacgacccccttccccccacccaatctgaattccagggcctgggcggtccgtgtggggttgctggatggacggtggattcaaagggaaacggatctttttcacttaatgcctagcggactcggctccagcaccccaaacagccaggaaaggaaaggcaggaatcaaacccagttctcccgtcctctcggccaaagaaatttccagtcaagctgtggggaggcgccaggccaaggccagcagggcccaagcctcaccccatttctaatcgaagactgagtaaccagatccgggagagggaaataggaaaaggttcccaggcagagaagaaaaaaactgtacacctgacacctgagcatcttctcatactaaaattctgtgtgtctcctcccattgcaaggtctgctttacgaccagacttaccagatcctcggcaagctcccccgctgggtgttaaacctccttaatccttcctcccacacaagcttctttccccctatgcttcacggagggatgggggtagaagcccaagaaagcaataggattgtttttctgccggaaaatcagagatgaaggacccattcccagggtacggtgggtaagaaggagaaaaagaccgtttagatacggagtagcaccagagactggcctccacccgtccccaagctgaagcttgctgtgcggggttctggtttctcctgggggagggagagggcctgccggctgtgcctcctctctgcaccctccttcccctcccagatttctggtggtcaagggcacagttcatcctccggacaggaggggaaggagtttgggggtagggccccacctcgcaggcaccttaccaagataagcagaatccactcactggcactgctctaagggtacttttttctgcccaattttccattaaaacacttaagagtataaagagctcagccgaaacggtgaactctggctcagtggcccaaggacaatctccactgacctgtcccgtcgccaaagggggtgtccaccctccacccttcaggctccacagagccagaaatagagtctattaacaattaccaccccccttccctgcacacgggaaaagaagcagaaaaacaaggcctggatccccttccttcctcggatttatttaacggtggggggagttatgtttctttggagaacaaggaagatctagcgagtagctaggatataaagaaccgggggaggcggggaagggaggaaatgcaccccacccaggagagggccactcttggaactgggagaaaaaggagctcttgggcaccccaggagcacagatggcgtgagaagaggagctggggaaagtggggtctggagggaagctggatggggaaagaaaatgctggccaggcggggagggagcggcagcaacgtggagagtccagcaaagcgggagtggggcggggtggaagaggtagtccggccggctgggtctcggggcgggccccccgcccgcacgccccccaactcactcactcgggtctccgcggcggcggggcgctctaccggccgcggggcggcttctccctccagggtggcctgagcgcggggcggaggtcgctctcctttccttcccgggcgtcgccgggccaggggaccgaagtccttttcgtcgttgagggttgggggacgaagcagggggctatggactatgactctcaataatttctttcagctcttaggaggtcgggctcggcagcggggggcccgagggcgggcgggcggactagcggcgacgacgcggggatggcggatcggagggtggttcgtgtcgcgcaacggcagacggtatgggctgtcgccggcagacggtcctgccctcctggccccgcgtcgcccgagccacggcttgcctcagccaacaacccgcaccttcccgcgccccggcccgaagtgagcaaagtcaatgaaaagtttcacccttagcaaccctgcgcacggatccggcttccccacccctgcgtgatgcgtccctccgccctgcaggggcggggccagggcccggccgggactacttcccagccagccccgcgcctcagctcgctggtatctcgcggagcagctcctgtgcccttctgtgctcgccggtcgtgcgtccggctccccgtcttcccctccctgtcacagcgccgcgccgcactcctttccttcattcccataccactctgaacttgtgcgcgtcgtgtgaggtgttctcccaggggcgctccgtgagggccggggaccacctggggccgggttgctcacgagccgggcacagtgcactctccctttagttgtgtttgggggacgagtatcgcgggggaggggagggagtcaccatgcccgccggaaaccccccgctgagtcgtccgccctgcacctgcctcggagcccatggttcggacgtttgcccgagccgtttcccggggccttccctccagctccgagcgtctggccgtgtccgcggcgatagcatcgccccgttacggcctctgcgggagggggaactgaggggacgacgcgggctctggaaacatttcggacccgtttcgggcaggcatgagtcttccgagcgccttgtgattcctcggggggctcaacgtcgaaagaaaggcgagggagactctggggcctgggccacgctgtgcgggagtaagaggagccgaggacgaggctgacggccgtgaaactagccgagtgccacaaaggaccttcccctcaccgcctctggcgctcctttccttgcagcctggagggccggctctggctctgcgcaggcgcgcgggcgcagcccctctcccaactcttgtttgctctttctggccagcgaccccagtgtggggcacgcgggagagccccacatttcttctagtcgcagtcccgccggcgtggggtggcccctgaccgtgcaacgggcgcaaggctcgcacccactacggcccctcgggcggcggagcgaggctccgcgaacccgggactgggcgcgccaggcccgcgcgctgaggccccctcccccggctctggccacgcgggctgctctgcctctgtgagtgtgcgggacacagagccagggggagggagggccgtgttctgcggtcacaggcagacaggagtgccggaagatgcagtctggagcccccgggggactgtgagtgaggtcttctccccggtccctccttagatctcccatttcccagttctcccctcccgcccacaccttttttgtcattccagacggttccggcccagcagcagccgccatccccacgttgggtggcgagatccgaaagtttccagctacgaacagtttgctttttttttttccttgatcgctttttttggcaagggcggagagcaccagtagcgtggggggtttaaatgcactttccctgaatgcaacagagaaatgccgggctggagggcaaactccaccgggacagggaggcgggagatagcctgagcgcccccccatcccccacactctgagcgtcgcaaccccgggggcacctccagggactacttgccttgtgcgtcagcgagtgacagcgtcacacacacgccccctcccgcacatgcccgctgcaccctccctttccccctccccttcccttctctcttttcccctagctcttcccaccaggcagagaggctcagccgacccacacgctcccagagcactgaaagctaaaaatatagccggtgtgttagcaacagccttcccattggtcgggggaaagggagaagcggtgtctgattgggtttaggatccagccgctaagactgggcccttgggagtgtgcgtttgcgccagcgggcacggcaagggatgctggtatttgtagtcattgattaaggcagccatgtaaataggtgggtttacatcccagttcggctaccgactgtgtgatcttgatttaatgcagcaaaacgcttgacatcaccaaacctcagtttccccatctataaaatggagctcgtgtcggggattaaatatgatgctgtatgtaaagcctggctcaaatcgttgctattcttaatttaaagattagtgtttgggccaaattgcctctgcacatcctgcatatcctgggctgagtatggtgtccactctccaatgtgaaacttctgacaatggtaaaggtgaaggtgagctgaagcgagttgtcctacggcatcttaggaggaacagctggag

SEQ ID NO: 70246 - DNA, 2364 bp, Homo sapiens
acacatacaaaagtttaccaattaacatatgtgaagagcttagaaaagcacctcggagatgataagcctgtataattgctggcaaagtgctgtgtgttggggaggggtcatgctactctggcgattcttcccgttgaaaactagagagatacagcgttaaatgtgcaagcggcagtggggagttagaggggcctttggctaaagtgcagcattcagtgttcacatacttccaggcacatctactcaaagccctctttgtggcacttttgctggttccacagaaaactgggagtgggaagggtgggttgttgggacggtgtgttccactcacatttttcacacagtcttccgatggctgcaagatgaaagatggtaaaaagtacaattagaataaaggttttgagaaagaggagaagtacatcctcgagctgggggtagggacatgagtaaggactgcagtgagtgagacctgcggatagccattttatcattacaaatttccatatgaaccaaacctacatccaagcaccctcctgaatctcctccaacgccctgggcaagctcagagtttctctggacctggttcagaccccaccccccgatacctgcctggggctcccagcacgcgcacccccgccctcttctcatcagaggccacaaacctgcgcgctcctacaacaccccgcgcctgagaggcgggaaacgtggcgcctgcgaggcaagcccctaaggaagagacgggaacccccgaccccccagctcctaataccacccctgcccagacagccaggggtagggcgcagtctcaccaacaccagcctgcttgcggcaaaagatcaaatcaggatgatgtttagccatagctcctaactaagccggccaccggaagcttcgggaacttccgtccgacctttaacccccattgttcctgcctccacgtcgctgtgattggttctctaagcttccgtcagtttacaatccttgcaccaggcccgtcttgctctcgcgcgagtttttgtcgctgctgggcggccaggtcctggcaggtgcatgaaactcttaaaaactctcccagatttggatggcggagataactaaaatttgttcttgggtaaaacatctttgtgcttggtatctatttctgcaagtgtctttgggcagtccgatttcctcttgcgtgtctgttcgttgcacgtgagctccgcccattgcgttcacagggttctggcgcctctagggaggcctcgccttcaccgtgacgccccactcttccgggcacgcccctgcccaaaggctttaaaggcgccgtgtgggacgtcactttaatgcgacctcatctttgtcagtgcacaaaatggcgccctacagcctactggtgactcggctgcaggtgagcgagctcagggacctctgggttcacgggggcggggtgcctcctactgtgccggcggctgtgggcgaggcagggcgaggcgggcccaacctggggccaacttctcgtgtacctgtcccggttgtgggcccggcacccgtgcccgcttctctggtgccctaggtcaaggcgtccccggcacagtcagctttcctggccctgtccctgcctcgcaagaagcgtgggcccaagcagcggcggccgggtgaagagcggaggcacctctttcttctttttgaggacagcattgcctgctcccgtggggtgtgtttccattcctcaaggtgaggacaaggtgactagggggcgcggtcgttgttgagtcttctaggcccagttcctgaggcctcacttcccatctcttagcaacagaggcatgacagcatctacggttgccaggcctggagtctggagaagaaactaggaccctgtaccaccttttgaggaccctgcggaacgtggaatgtcggggaggggggcggtcttctgggcccatacgtagtaaataatataataatagtctctcacctttgcacaagatttgaggcctgttttaattcttcataatattatttgattcctgtaatcgtaggaatgaggtggtttttctcatttgatagatgataaagctggtagaaagtaggtgaaagttctgattctcaagagtgtcaccgaagtgctgtggcagaagcatgggccctaccaccactcagttcttgtttatgtcagcctgccctcacagaactttatgaaccacggtgcaattatttctgtttgtcagaatgcagtacgaatattttgagcctcacaataagttgcttgtcaaatatgggaggataaggagactccagtttgaccttgactcccctgttaggagctatctagaaagctgactgactgccagatgattttttcacttctaacttgacagc

SEQ ID NO: 70247 - DNA, 1153 bp, Homo sapiens
tccttgtagccgggctccttgaccttctgcagggcatctgtggttgtggtatttataagcactcactgtgtcatgagtgtgttcacagagctctaagacaagggccctgtctgtggaagagcttttagggtggtgagggagaagtcatctaaatagctataatacacggtactgaagcaaggagtaggtgggggaatttgctgggtgggactaagtacagcctcagccacccgtcctggaacatggatgtagtggtggtgtgtttggtccgcccacagacaatgacagatgcccatccaggcctggaggagcggagaaacgcattacccaccatctgttgagcaatcaggccctctgtgccagtcacagaactaggtcttgttttacaaatattgcctcatttgtccttcacaacaaccctaagaagtacatatgagtagcctgtttcacagtgatgaaactgagtcccagagaggttaaatagctcctctgaggtcacagctagcacatggatgcagatttgactgcagaacccaggctttttaccagtcagccaaaccgtttccccagagggagtagaaactgatctctgtggagtgggctggatataggggatacagttcagtcggctctgtgcctgtttgggttatgtctttgagactgtgattgtctcctgccctaaacaccagtgaggctggtgggggagaggctagaggggtgggttgcacagaggcagctttattccttgactgagcttcagctcagcctcacaggctgcctgttgagcttgcagagaatgcccgtctcaagtgtgtaggtgcagagctgctgcctgtggggccagagcagggcttgggatttgtatgcagttcatagtgtacgactgatgtaggcagcaaaagagaattagtcagatgagcgaatctgtcatcagcctattccttaaaggaaccccctgctgcctttggtacccatttagaggctttgacttggagagacatggctccttgctccctttccaagcctctgaaaaggactgcatcacttttgttcctgccagttgcatagcaaccaagctagctgactgcctgctggcaggagggaattgtttagctttgatttcttaggagaggagccaggcatcgcctaccag

SEQ ID NO: 70248 - DNA, 1071 bp, Homo sapiens
attttctatctcctctgggttttagtcaatgagggcttttcttacattgatacaccttacatgatagaacttgactttgatcccagcgatttttgtctataaatcccttgcacttttttcctaccccaggctgtgttccttgtggctgctttgtcatccctgtcctgcagatgaggaagctgaggctgcagttactgaacagctcttgacactttaattcctggatttttttcaccatactgagctgccctcggggatggactctcctaagtgctccattgacagtggctgtcatgtttcttcttgcagaaagctctgggtgtgcggcagtaccatgtggcctcagtcctgtgccaacgggccaaggtggcgatgagccactttgagcccaacgagtacatccattatgacctgctagagaagaacattaacattgttcgcaaacggtaaggctgcagatgggaggctgtgactgtcaagggcattgcgtctgctgcctgcccgtcaggcagagaaggaggtgttttgtgaaggatgcttggtgatagtggcagggtcaaggtattcaaggtacaaaggtttctgctgaggaaaggcattccagatcagtggtgtaacttctgtcctctctgccaagggagaatctgtgttatcaagaagcctctagatgtgaaccacagccaggtctctgagacactttggcactataacctgaacctcccaaccttttcagggcaggctgctgaccctcggcctgccctctggaagccaccaggcccagtgcctggagaatcatcttctatttcctcttcagtgcacaggcacagaggagagctcaggtctgagacccagaagataaactaagatgggacctttttaatttaattttattttattttattttattttatttatatatatttgaggcagagtatatatatatttatatatataaaataaaaatatatataaatatatatatatttgaggcatagtctcgccctgttgcccagactggattgcagtggtgcaatcttggctcactgcaacctctgtctccccagttggaac

SEQ ID NO: 70249 - DNA, 1227 bp, Homo sapiens
aaacaaaaaacaaaacaaaacaaaacaaacaacaacaacaacaaaaacaatgcatggctggaaggacagcaatattttatccccattttaaaaatggaaactgaggcccagaaggggtcagtaacttgcctgcaattgcaaagtaatttagaattgtggaatctaacacttccagttacaactccctttttcaagcccattttcttttgatccccttcaatatctcctttcacggtgaagaaaagttctgagacattaagctgcttgcccacggccagggcttggcatgaccgaggccgggcctgcggccagtgggcggcgctcgctctcccacgccaaggcctgcccgcgagccgtgggcccagtaccttgttggccaacttcttgttcagctcctcggcaatggagtcgttgagcttcctctcaaactgccaaggggggatccggacggtgtccaccatttccaccaggacgaacatcccggcctgcgctgggggctctgggaacaggagggtcagtcacgcaccagggccgggggcagggagaatccccgagccccttggtcccgtcccagtcgctgaggcccccaggctggcggtgaggttgcacggggcggtctcgggggcccggtccgggccatgctccgctactacaacatgaggaaactgaggccagagggaggcactctccgtccacagctccgggtgcgcgcccgcgccgcgagaccccgccacgccacgccactccacgccacgccactccacgccccgcacccgcgccacgtgccgccgctcgtatcacgcaccacgcaccacgcaccgcgcacagccgctcgcgcttgcgcgactgcgggcgagattccgaatccatcgcttccggaaaactcaccaataagaaacctctgtccacccccaccccgccgaggcggggcggggctgcctgtgtgctcgcgcacagcgtggggcagagagagggcgaggagagggcggggcctcctcctttcacaggagcagagcggttcccccgcccccgacagcgctttctgttgctaggcgacctccgtgcaatcccgcctgattatccctcgcctggcctgtgctttacccgcattgctgtcctctgctcggcagccagagtgatcctttggaaacgcaaacatatattaccacatctaagttaaaaaaaaaacccaccgcaaacataacatgcttagcacccttaagtgtt

SEQ ID NO: 70250 - DNA, 1120 bp, Homo sapiens
atcagagggccttatgattatattaacagctaacattcatgagcacttactatatgtcaagtactacttaggtgctttatatgcattaagtttgatcctcagaacagctgtatacagtaggagctatcatcgttatctcacttgcccaattgtctcattttgcctcatctaaggtaaacagaggttaagtaggtcattcaaggtcatacagccagtaagtggcaaacctgggacccaggccccagagtccctaatcacgaccaccaggctgtgccccgccatgacgttagaagtcaggagttcgagaccagcctggccaacctggtgaaaccctgtctctactaaaaatacaaaattaactgggcatggtggcgcatgcctgtaattccagctactcaggaggctgaggcagaatcacttgagcctgggaggcagaggttgcagtgagccgagattgcgccattgcactccagcctgggtgacaagagtgaagcactgtctcaaaagaaaaaaaaaaaaagaaggctaggataggaaaataacacagggacatatcacctgggtagacagcaaatgggaaggggctggagcggaggcaggaccaggaaggaggttattgtgtggccgcagcaagagatggtcagagcaaggctggtagccatggagagtaacgctggtcagagtccagaggtcttcagggggtggaatgggtgggatgacctggaggacagaagtgggaggagccgacgcctgtgggctttagccttcacctctgagatgggaaactgcagcggggccaggctgggggcaaggggccagagctgaagcggtcagtgtgtgggttaccaggctactgttacagtattccgctcacaggattgcaacagtgatgtgttggcacgtttggtttactcattggtaaaaccagagatcaggcctctttatgaattctccatgttgctccatggaaggtttgaggtacaaaaacacacaagcgggccgggcgcagtggctcacgcctctaatcccagcactttgggaggccaaaacaggtagatcacaaggtcaggagatcaagaccatcctggctaacatggtaaaaccccgtctctaccaaaaa

SEQ ID NO: 70251 - DNA, 751 bp, Homo sapiens
gctctgggcacatgttcaacagcccatgggaggggccaagagaaaggagactggacgtgaagggaggggtcagggccttggccacagcagccgggcctcagcctcctgagagctggcctccgggaccctgcctcatgttccgcattcccttccctcaccctgtaccctgacactgcctcctttctgttcctccgccaccccaagctcatatacagccaagggccttccaacctcccgagcttcttccctctcgatgtcttctctctaggtcctgacaagctgggtcccgaggtcacctggagtgcagaaatgtccgcccagccactccccctctgctggccaatcagcttataacccatcactcaaacaacatgggggcccccgggagaagggccagcctgggcatccacattccagctcaagtcctgatgccagttctggttggccaagcctgggccagaggtcctacagaccaagagaggggagaggtgattccccaggtgacaacatcaaggcagttcccagcaaacaggatagtaagggtggccagggaaaactgccagcgtccaccatggctccagcgcttctgctgggagggcaggttggtgtgtttgaaaaacataggtccaccgggcgcagtggctcatgcctgtaatcccagcactgtgggaggccaaggtgggcggattgcctgaggtcaggagttcgagatcagtctggccaacatggtgaaaccctgtctctactaaaa

SEQ ID NO: 70252 - DNA, 647 bp, Homo sapiens
ctccagcctgggtgacggagtaagattccatctcaaaaaaaaaaaaaaaaaaaaagaggactatggccaggcacagtgactcacactgtaatcctagcacttagggagactgaggctgcagtgagccatgatggtgccactgcactccggcctgggtgacaaagtgataccctgtctcaaaaaattaaaaagtaagagagaaccatgacaaccatttcctgccccattctgcatccttttaggggagctgagaattggagcagagtcccagcatgggctgtggttcatctgccaagaaggctgagtcaccacccagagtgccccatgacactgcatccagcctcaggttatctccaaacagcctgacatttgtgtttacttctaggcccctttgtctgcagagtcagtcatttggggtctggccttctgcagggaaatgaagatgagcttggctcagagcccaaactcagggccgggggacagggggatgcacactcgccggggggcctttgacacagctctgtggctcctcccgacaacctgggtaggatgttatgatcagccccatttgacagatgagggatctgaggcacaaaaagggagagttggccgggcgcagtggctcatgcctgaaatcccagcacttt

SEQ ID NO: 70253 - DNA, 943 bp, Homo sapiens
ggaggtggaggttgcagtgaaccgagatcatgccatcgcactccagcctgggggacaagaatgagatttcatctccaaaaaaaaaaaaaaaaaaagatattagccaggcatggtggcacttgcctgtagtcccagctaccagctactccagaagctgaggcgggagaatcacttgagcccaggagttcgaggctgcagtgagctgtgatagcgccactgcactccagactgagtgacagagtgagaccccggtctctaacaacaacaacaacaaaatagcatcacaatcaagttgatttttgaggagccaaagaacaataacaaaaatagcctcacaaaacaatgcttaatatttgctctgggcaaatagatccagataaaggcctggagggaagccacaccacagtaaccacattaacttggggagccggccaggctccccaagtgcggtcagagtggactttacccttctctgttacgtttccattctttaccaggagagtgtgctcatgaaaatgtgtacgattaaaaattaactttcaaaaggcactaagcacagaggctggcccgtagacaaattaataggctgttcttattcaggttgttatgtttgtggagcaaaaggtcagagggaggagtcagaactgtgcctaggccctgccacttttgttccagttcttttattcatttatttgtttgtttgagacggagtttcactcttgttgcccaggctggagtgcaatggcacaatcttggctcactgcaacctccacctcctgggttcaatcgattctcctgcctctgcctccccagtagctgggactacaggcacacgacaccacgcccatctactttttgttttgttttgttttgagactgagtctccctctgtcgcccaggctgtagtgcaatggcacattctcggctcactgcaacttctgcc

SEQ ID NO: 70254 - DNA, 1987 bp, Homo sapiens
tggtcttaaactcctgacatcgtgatctgtctgcctcggcctcccaaagtgctgggattacaggcgtgagccactgaacccagcctaatttttgtatttttagtagagacggggtttcaccatgttagccagactgatctagaattcctgacctcaggtgatctgcccaccatggcctcccaaagtgctgggattacaggcgtgacccacaagcaaatggcccacctttgctccagtcctgctatcttcctcccggatccacccctgcaggaaggcctccagggcccaagccagggcaacttcaccacagaggatggggaggggcattcgggacctaagagaggaggctaagacctgggttcccatcagccactgcccagtaaagcccatcccactgctcccccacgctaggagacctgttggttggtccttgaggcccccagactggagggtgggttacccacagggagggcatgaatgaagcctgcttactgatgcatccagctggtgagggggcttttggggactcactcacaatgagacccaatgggagaaaaactgagcagaggtaagaggctcaacacagcgagagtctttagaagaaaactagactcttaccctcactattcctcagtgtcctcacagcaaacaggctaggcctggagcctctcacatccgggtgggtagagctcataaacgaatttgaaaagaagccctctctgctccacgactgggggtggaaggtaaagtgggtgatggggcttcagaaactagacccagtcccaggcctgcaaaggtcggggtgggaagactccgagacgccctgtctcccaccagatgatgactgacgcttggctgtgtgcttgtgtgcctggaaccccggttcagaagccagctccgaccactggtgtgtcgtagggctgaactagggtgggatccccagctcaggaggcgggggcgtccgtgagccaggccttagcggcgtgtgacagcctccggggagggagggagctaggcccctgctcgcagcctcctccctccagtactggatccaaccccagcactcccaagcagaacacaggcaaggacgctgcggggtcagtgacgtgagggccaggtcccctcactcccggtgggtggccccggatgtcagggggccgggtaccgccgcatcccacactcggtccccgggtgtccacggtcacgctgctgcagaccccacactcagcctcgggggtgtccgcgtgacactcccggtgggagcttccaatcttcagggtcctacctggcgagccggcgtgagggtcccgtccacgtcaaacaggcagaggacgcgctccttcctgcgggctgcctgggcggtgactgccatggctgcaggtccgcgcgcggggcggagtcccgaagatgcaacggcagaagcagctcagggataagtgctgacggggcggggcattagggggcgggggccagtggactgcctgattggccaaatgaagaaggggcgtggtctaggcgggcggaagcgggggcggggcctgagctgattctcattgctcgtggaggaggggagcgcggcatagggcggagcggagccctccaggttcgattggattgctccaaacaaggcggaggaggggcctgagcctgggacccgcaggaagtgagagggtgaacccggaagacaggggcggggccagaattggcgggttgatagtgattgcaacaggccgattaaggggctgggtcgggcggggcctctaccatgcagtgcagtgtctagtgggccaggcgggactaagagagccgaggtcgctccccatccactctcacaaggtttgtggccatctctttgccttacaaattttgagctgtaggaaatctcctgagccgggcgcggtggttcacgcctgtaatcccagcagtttgggacgtcgaggcgggcggatcaccggaggtcgggagttcgagaccagcctgaccaaca

SEQ ID NO: 70255 - DNA, 547 bp, Homo sapiens
acgatacatgacacatgcgtagcacagggtctgggacataatacatgcccaataaaggctaactcatttcttctagggtttataatttgaaagttttatagttgttctcatagtaccctggtattgaaactattcacgtgtccttctccccagttagactacagttgcctcagtaaccaggacagtttcttatgtatctttataactccagcacctagcaaaggacctggtcctgagatgtgacatgaacatctgttgagatgagctgttctgtttagttagctttgttggttgacacacagtgctattgaggacaaagttcctaaccccaatctgggctgcctggcttgttattgcaatgactctgccaccctggcatactgcactcccagtctactgctgtcttctcagatgcgcatgctcactgactcaggagtacagctggcaggtatggatgtatcatcagctcaaacccattcctactaaacagatttttgaagaggggcctcagttatttcacacctgaaaaacaactcaaaagttgcag

SEQ ID NO: 70256 - DNA, 3574 bp, Homo sapiens
ggcgcctgtagtcccagctactcgggaggctgaggcaggagaatggcgtgaacccgggaggcggagcttgcagtgagcctagatcgtgccactgcactccagcatgggtgacagagcgagactccgtctcaaaaaaaaaaaccaacaaaaaaaaaacacttgactgatgtaatctattaatgagtaacagcttcctcagtgactttgtaagttttgctttcagatgtgcctcaatcattttaacaactggttatctaggcccaaatccctgtcaaataatgggttggctacataagaattagctgataagctcattaaaaatacagatttttggaccaaaactccaggagattctgatttagtatttgtgaagccttagaatccatataattaaaattttctcattttaaatagatattatgtgtatgtaatacacaggtccagaggtaagaaacagtttacagcaaagtttctcttctacccctgttcccctggcatcaagttcccctttccataagctactgctgttatcaatttcttgtgtatccttacggataattatttgcctaagcaagcacatatatatcctttgatttgcatatttaaagagctattctaaccttgttttttctaatctcatttacaatatatgttggaaatgagggtatctgcatttttaacaagcaccctagatgattttgatgtgaagccaaatatagaaacaactcatggacccacggttgtgagattaagttcaattcactacgacatattagaaactcaaggacattgaaggatgccctcaaaagtagcctcccttacttgatctctgccccctcgtctcacagagatgaactaaatcattcgccagtgtctccacagaagccaggaaaaactagccattcaaatggatgctgtcaaagcttcaattttcaataattggaattctttcctgctcattgttacccgaaattacaaacctgacaattcctgtgttacacaagacattcctgtatttaagttgaaataaggtgtgatcgtcactgaatgagggctggtttttctcctgccagttaagtagtttaatggagcacaaccgaaatactttctttactaatccttattcacacagcctcatccaaacttcccccaaaactgctttcttgccatttgagcaaaagcaattaacttagaaactgtggggagaagactgcttggtgaattctggagttcggggctcctcttatcctgacttgacctacctgggggcgatggctgggtccctaggcagctctatctcccccatcccacctatccctgggactgcaaagggagcttccttttggcactgagacaaggttctccgagagccacccgacctccgcagtgtctctgtcaccacgaggggcaccgcgcggcaggcatcctcacctttcctacaccgcgccaaggaggcaggagtgcactgggctacccgagcgaggcagagaacccgccgggatccagcgctggtttaccccacaccctcgtcgaaggggctctcgagggctcggtttctgcccaagccccctgcaaggtggaggcatgactcctccatcccttccccttgaattcaaacgtgaggatggtatctgcgaggctaaagcggggctcagatggcccaaacttcagaccactctcttctccactcggcttttcttccatcctcctggccatgtgtctccccgtgagtcgtggcccaagtctccccacctcggccagccgccaccctctggcctggctcccgccctcctgcccacctggccccttccccctcacccagcatgatggggctgagccgccgggccaggcctttggacaggtcgtacacgtagagcttcaccggatagagattcggcggctccattgggacccgtggcgacggcggccacgacggccctcgggcacccggcagcggcttggaccttcccgtacccgacgggagtgcgaagcggagggagagggggggaccgagcccgggcccgggctgaggggtgggggagaggccgccctgcgctgctcgcgcccccacacccgctaccggcaacgactactgtgaggtgacagagaggggacagggagggcccacacggaagagggggcgggggcagggatgcacttttgcgcatgtgcttacagtcctgacgtaggaaggggcggggctttgccgaagggggcggggctctcgctgatgggttggctttcgtcagggacataggtagaagctggttggggagtgtgcgtgccagcctgacgcgatatagtgcgcacatgcgtgatgacgtagagggcgttgattgggaccgagtacagggcccgcgcatgcgtggattgtcgtcttctgtccaagttggtcgcttccctgcgccaaaggtaagcgggccgttatccatttgtgttgttcgccagctaggcctggcctcgtcccgcttcgctcggtcggtctcgcgcgcccccatagccttgctagagggttagcgttagccttaagtgtgcgaatccgaggagcagcgacagactcgagaccacgctccttcctcgggaaggaggcggcacctcgcgtttgaggcccgcctgcgtttgaggcccgcctgcgcttgcggcccgcctgcgcttgaggcctgtctgcgtttgagatctcattgggcgtgattgaggaatttggggaggtttttgggcggtattgaggacgagggggtccgttagtcagcatagaatcctggagcgggaatccctcaccgtctaaatggcgtcgggggcgggacctccgggatctggcttccgcgggccgccgccggccctgaaacgtgagggatagctgagatgaggcagctactgggatggcccccatgcgcatttacatgcagtccgactgccgagctttcgaggcagcaggatttaccgtccacattcctcactactaaccaagcttttagaacagatctcacaagaacctagaggtcggtattttttcgatttaaatttgcctgttactgacgttaacgtctttcgcctagtgagcagtagccaacatgtcagggtgggagtcatattacaaaaccgagggcgatgaagaagcagaggaagaacaagaagagaaccttgaagcaagtggtaagtgacttcagcatgtagtgccattcggtgtgtggaagaaagaccttccctgcctatctctgctggatggactttgctgtttgatggcctgcccttctcctcccagataattctgaaattcttttcttcctttgaacttcgcagagctaccctaggctcttatatgcagatcttactctagtgtgccctaagttttttttggacactggtagtttgacatcttttggtccctgataaatggccatgaccataggtattttttgtcatcttaagtggttcaggtgagacccttctcatccaggaaagtagtgttaccattccaggacctcagtgtaaaaatgcccccaccctgcaataactacaccaaccaaagaataaacgcaagcaacacagttacaggaaagtgattgattccctc

SEQ ID NO: 70257 - DNA, 596 bp, Homo sapiens
acagagcgagactctgtctcaacaacaacaaaattgtcattattccataaataatacagtatgacaattattgacatagcatttacattttattaggtatcgtaaattatctagagtataatttaaagtatccgggaggccgtgcgtagttcatatgcaaatactgcgccatgttacatcagggacttgggcaacctcagatttgggtatccgcatggagtgccctctggcgcttgacttctaccgcggccatcgcgcttccatccgccaggtggcgacacagccggcgcggagcgccgatctgggcctgcgcatgcgcgccacggacgaggcaggccgggtgcctgggcctgggagccataagccggagagtctggcgggctaagctcagcggcatccgggttccttgtggccgccgcagcagctcgagaacacgaatccgtttggccaaaactgaaacaaacacacggatgcacatatgtctgtttacttctaggccaggtgcagagggaacgtctggaatgacactcaacgaaaactgcggttacttgggaagatgagccttttacctctcagcctttccccttctgtaatgt

SEQ ID NO: 70258 - DNA, 1791 bp, Homo sapiens
taaatgtttcactattagtcaacaaaaaagttaaactcaattttaaaaccaaactagcttataaacactaattgaaacttgcttagggtgtatttatttgcctttcaatttcttcaggggttaaataaattaacgaatgatatcataccaccagccaacctaaatccctacctagcatgatcagtttggtttcgctgtacaccagacagccaaaacttgcaaggttttgattgaacaacaaatactgcgtgcttactctgtaccaagcatcaggactagatgtttaccatgctttatttcatttgatcctcacaacaccctcatgcactgtcatccccattttacagttgaggaaaactgcaaagttcaacctgagaccatccgattccaaaacgtttcagggagctgcgttaaagcgagcactgagtttggaagcttcaagttctaggctcagccacgtactaagcttcaaaatgcatgggaggaggtttgtggggagtgctaccgccgggatccaagctccactggaaggattaactatagaagttacagtgctttacaaattcttccctcctcaccaagtgccaaccaaaactactacgccaggacacacgttttagaactttccctagatgtttaaaagtcagagacgaccaagagtttagagacgccgcacgtggtgctaccagacttctggtttttgaagccaccgccttgcaggagaagcctttcctgcactccaggccgtgagtcgcgctcacttcatgttccccacagcccccaaatgccaaaggctcctctaggtccctggcgcgtgtgactcgcggcgggcactaagcgcagacccatgggagatctcctcctgaaccccagcaacgggggtggggtgaggtagggtgggtaggagaggttgatccgaatcccagggtcccacgccatcgtagatttcgtatgaaaagaaacaaggaaaaaaaaaagttggagccaagttttcttcacccaactttttgccctctcccacgtgggttggtctctttctcccaggctgggccatgccccctccgctcgctgcaggccttttgccaagcaaacagaccgtgcggcaaagcaacacagctgcggggatcctaaggtttcctgagttctaacctcgggccaggctgctgggaccccgccgctgctggggttctaactaagggcccggcggttaagacccaacgccggcggatgagacggcgcaggctctaagcctccatctaacaggctagggagtgaacgcaaccctgagtctcccgcttcccggtccctcggccggcgcacgcactcaccatggctgcggttccgcgggctcagcactcctaggggagcgcagctgacgtttcagaagcactcgcgtgcaccggaaaaactcacagaagcagcagcggaaatggccccgcgcggcaggaagcgaaggtgacgctacgcgagcgagtgggccccgccctctacgggggcactggcgcggaaactggccctgtgtcgaagaaggaacgtactttggcgttcttatgagctgcctagtacaaattattggcagaaacaatgaattaaacattcaaaaagtaacccaccggccggccgcagcggcttatggctgtaatcccggcactttgggaggccgaggcgggcgcatcacctgaggacaggagttcgagaccagcctggccaacatggcgaaacctcgtccctactaaaaaatacaaaaattagccaggcgtggtggcgggcgcctgtaaccccagctactta

SEQ ID NO: 70259 - DNA, 1614 bp, Homo sapiens
cgagctctccaaaaacactgtactaccttgtctaccaggagctggtttctcagccagttggataagggattgtttcagcaaggagactgatggcctcctcagggaaggagggacgggacaggatttgttcttgtaacagcattcaaggagtcagctgggtgcctcagctgtactcagagaacaccagtcaggccatcctggggctggcagggcagagaaaggcctaggggttggggctgctgcgattcaacagctcccagaggcacttgacctgctccctcgcctcacgtggaggtggatagaggtaaactttccaggcaaggagggtcaaattctcagctttcctatcagaacgaaactgtcccagcctcagcccttgtctggctaaagtaggtcacctctgtcccttcccgtacagccgtcatcagaactggtgtttatgcaccctcgtgggtagatcctgggaatgcatgtccagcttggtccccggcatgaggtctgcgctcgacagtgcctgccctgcgcctgttctggggagctcagcccagaccgggcctccagctcccttcccgcccggcaggggccccgggcccggagatggccacgccacgctgccttctcgggtctgactgtcctgatcctgcgcaaaagtggggctgcactcggcctaacgaacggacgaggaagcccccgccgcacttggcttattagttggtggaccggaggggcaaggaggggatgcccgaatcctgcactgagtctctgaggtccttaaagaagaacaaaagtgctagtcaccgcccactaaactcacgttgcgatctaaagtttaaaaactcggccacagacgacgacacagtttcagggagggcgcgcagaaggtcgcccggccgacaggagctgggaccccagtttgctgattcacgccttaaattgggcacagaccccacccacagatttaacttcctccaacacaagctaaatccagggccacgtacccagggcccgcaggagggacaggacgaggatggtgcccacagcgcgctggaggcacgccagagcctggaggggcaggcaggggcggtggagcggggccggaagtgaggctagcggagccccgcagtggcggctcgcgctcattggccgggagcagcgcggtgggcgggacggagctcggcggtctgcgctcggttgctagccgtttgctcccgctttcagttgctttgctgttagcctgttggaccttcgagcctagctgctcgcacaggactcggccacctgcccttcctgcaccgactggccaggtaggtggctgtaggggccgcgggctgcaggttcccgggaaggataatgagagaaccgagggcctcgaaccggctgcaggtggtggggagggagtttcgtggacctggacgcctctgttccttgagaaggctcgctccctcctccgggagctccgaaggctcggggtcaaccacctgggcccccgaccccggtagctggctcaaggcccgccactacctggtacctctgcaggagttcagagcctcatgctgagccaggaggagctccgggtgacgcatacggcaggatcgggattgagaggctgaaaaa

SEQ ID NO: 70260 - DNA, 2672 bp, Homo sapiens
gcaggaaccatttgtttccctgccacagagatgttcaataaatattgtcaattgaatgtgcaaataatctcacttaaccacagctatgagggatgctattttatccccattttagagatgactaaactgaggcttagaacaattaacccaaggtcacagtgaattagtggatccatgtgtctgcctccacacagcctgtgtgttcttaattattgatcactaagcaacagctgcctctcacaaactggcaggaaacttcaacttttcccttttatcaatatattgtgaacgccttttcttgctaataaatatacatttgtgtgcgtaatttttaatgatcccatggtattccatcgtgtggatgtaatttacatattcatttccttattctcacttcttcctagttacagcacttctttaagcacttgtaatttttattcctttggataaattcctagaagtttacaacacgaccagctgcaagatggggcagtgaggtgcttgaaggagtgggtgggctgcacttcagaatcccggtggaactttttcaaaaaactcgtgcccggggcccccctctcaggaggccgtcggtgggcctgggcactggcgtggttttcaggtcctcagtggttccgaggtgccagagattgaggaccactggagtaagcgcgaggtcacggcgggtgcaaagcagaagacgtaaaatcctgaccgccctgggacaatctgcaaccttgtcaagcctccgtgcccgcctttgtaaggaggctgggagaagcgggacttggatgacccggactcccgtcccgagcgctggggtccaggtttgactccgctggctttctcaggcgggcagggcgggggtaggcagctgggaagatgacgtaatgtgctcccagccaggcctggaggcggccagcggtcgcaggtggagggtggcctgttaacccttcactcccaggccagtggacggacttgcgtgtggcgcagatccaacggagaaggcagcggctcctttaaacaaggcggagaaggttaagatgatgaccggacggctactccaggcattcgctccgaggccgcggggggagggacctcactatgcaaatctgagctgctgatcgatgacgcgccatcaccccacgcaccgcttcgctcgcccattggctgagatgagcctggtcccattgacaacaaacaggggggcgcgcggcctggaggcggggccgcagggggcgcgggctggggcgggggaatcccgccccgccctttctgtgcggcgcccgggcgcaacgcaaacatggcggcgggtggcacccgtcggtgaggcggtgccgggcgggggttgtcgggtgtcatgggcggtggcgacggcaccgcccccgcgtctccctgagcgggacggcagggggggcttctgcgctgagccgggcgatggacgacagcggcgagctgggtggtctggagaccatggagaccctcacggagctgggcgacgagctgaccctgggagacatcgacggtgagtggtgggtgggtgggagtgcgggggccgcgcggggaggaaggggttacggcggcgcgcccgggtgcgcgtgcgcccaccccccgacagccccggttcgcgcgggaagaaccccgtgcgcacggtgcccccggcggtcctcaacccttccggcgctgcgagcgtgagcccgacccagctgcgccgctccgggaggccgtgggatctggggcgccgcggggccgaaagcggcgcgagggtcgcgggttccagagcgcggggctagggacgtcgcgggggcgtctcagggagcggcctaaggagagcgcgtggccgccgcctccctcgcgcgcccacacgcggtttccgtggtccgctctcccgccgcccgcgaccgcgcgtcgcacctgtcactcccttcctggccgcggggacgtctttgggattcccggggcccagcccccagtctccgcgccccgaatccctgggcttctcaggattgaccgacggccaggtcgccgggtgctccgcgaaactttgggcagcgactgcagaagcaagttgctgatgaagagagcagtggcggcggagtgtggacacatctctccgggatggagacccgggcgctcctgctgtcacgctgcaaggggaattgagcagaagaaattttgagttgtggcccctcgggtacgggctggggagcgggtggcctttgttccagcgccttaacagcggagtggaagagctggtaggagcccagggatccactcttaaaatactaattttgcgaccacgggaacaacgatttggagagggtcagcggcttgctcaaggtcacccagctggttagagcctagttcttgcagttccttggccagtattggtttttttatacccctcctttcaagaaagagtccagttgactaggctagtaatcttattaactggatagttgcactcttatgtttaggccccaaaatgctttgtattatttcacttcttcctcacaacaatcctgtgagatactcttattacctctattttaatacggtaattaaagaagccgaggccaggagatgttgacttatctaaggccactcaccttagagagcttaggcagaaacacaggtgcattgtacttttcagttttcagaatgctttcatgtcc

SEQ ID NO: 70261 - DNA, 781 bp, Homo sapiens
ctacagccttgcaggcatgtatgatggctacatccccgttgtgcagatgaagaagcagaagcagcagaagattctcttttgggggaagagataaatgcagcagctaattgaaaaggatctgtttgccattttcccattttgcttttgtaatatttctccccttggtttgtccttgatttccattttggtcatgtgggcagtgtgataagacccttaattgaagccccagttctaaccacagactctttgctaagtgcttctaaatacagaaatgggttaacaaatgggggatggggtaggtgggggttgggaacatagcaagggcagctaacatgttttgagaacttctgtgccagacggtgttaaacagttatacacgttaatgttctcaatcttcctaacaaccctgtcaggtagagagaactgttatacttgtcatctccctctcactgatcctgaaagtgaggcccagggtggttcattaatttactgaagattacacagccagtagaaagtactgtatgtctatagctgcctacctgcaagggcacagaaagaaattcatgtgcattttgcattcctattccatgatcaattcctatttgtcttattttgtttatctgatttttaaatttaaatttttatttatttagttattttttgagacagggtctcattctgtcacccaggctggaatgcagtggcacaatcatagcacaaactcttaggctcaaatgatcctcctgccttggcctcccaaagtgctaggattacaggtgtg

SEQ ID NO: 70262 - DNA, 421 bp, Homo sapiens
gttttgacactggagtatatatgagggttgctaacgtttgggttgaaagagctgctgttgtccacagcttatttattttccacccatttttgtctcctggtctcatccagttacatttcctgggatatgtttttggaggttgctcagatcacggcactagagtccctttgggtttctcctccctcctctgtctatttggcctcgcccttgacaaacattccccacattcacacccaggcctttggcctaatgttcttgaatgctgcttgcctctcattgaataggcttttatgtagctctcatattcagttcatattttggcattttaaaaaatatatatttttgcttctttctcaactagatcatttcactcctcaaatttgtaattaaaaaaaggaaattctcaagcagttttattcaa

SEQ ID NO: 70263 - DNA, 725 bp, Homo sapiens
tacagagttaaagaaaagaaaaatgaaatgaataaaagtaaaagaaaacctgtgcctgtctacaaggagctcaggtcagacgagggcagggattgtggctatcaagcacctcccatatgcctagctaggagccaggcttgggaactctcaaatgggtaattcccggtccttgttatcagctagctcacaacatgctgacctcaggctttctcttactctagcagaaacaggtatgttttactttgtgtcccactatggatagactgctgaatacatcaggtatgttcaagcattaccacatctctatttgtttccgtatctcagtaacagcagagatgagctgagaatgaatcagaacgtgccctgtagtgacattgatatatttcctgaggtacatcacgatagtctaggggacaaagggcgcagggaagcccagtgtactctttatgtctacacttgatcttagccagaaggctgagaagtgatactttttatgtcttacctctgtttctggtgactacagataagagactcatcccttgattcactcattcagcaaatatgactgagcaccgtctctaagcaggacatttgccttgtcctcagggagcatagttggcaaggaatctagacagcagcccttcttgagcttgacattgatcttctcatgaggaggactgggctccaggtggggaaagaaccccatcctcacttgtgggctagac

SEQ ID NO: 70264 - DNA, 676 bp, Homo sapiens
cccctctctcgtggctgaccccacaggtggtccagctgctcacctgtgacctgctactgtcgctacggacagcgctctggcaaaaacaggccagtgccagccaggctgtgggggagacctaccacgcgtcaggcgctgaactggcgggcttccaacgggacctgggcagcctgcgcaggctggcacacagcttccgcccagcataccgcaaggtgaggcccagctggctggtggggcagggcagattggagcctgtggggcctgagcccagaacccagcatgggcaccagcatgtggttgtggagttggccctctgaggtcagcctggtgacctgtcgagcacctgcttggctcgtgcccaacactgggctaggcgccatgtgtccctgtgttcagcacacattggttgagtgcctgctgtatgcctggccctggagctcagcagggagcaggccacactttgctgccacagacaggggccagcagggagctgtgcctccccaggcacatgctgggtgggagggctctgagggcaatggtggcaagtcagggctcctggcctggtcccgagctccacgttgactttcattctttttcacagtagctagaggcttcggttctgctgctgggtaacatccccttggcagtggccacgtgatctgaactaagtcacgga

SEQ ID NO: 70265 - DNA, 1559 bp, Homo sapiens
acggtgacattacagttaaatttcccaattgaaaacaagcaaacagacactcaaactggtcctgtaattgttgctagactttatgtgttgtacaactaaacattgctgtttgaacagtaactgcctggcctgtcttatttgtgctccttgaccaaatcagccattatgtcatctcacccatgtgtggagggtgagactctcttggtaagaaatagccacagatattagagatgaaaacactttgtgaggtcagttcatcttcagttggcgtcaggtcgggcctcagtcattattttctagtgtttcataaccaaagtgagtaatggatgggaggttgaggtgggaagatggcttgagcatgggaggttggaggtgcagtgagctgagatcattcctgacaggaccaacccaagtccatacctaaaggcagggggctaagggggcaggtgaggtcgggaggccactcacctatcactcaccccttcgcgctcgagccaattctcagggcccgcctctttctcccctttctcggcgggggcctctaccctgactccgccccgctccccgggcactgccccaccacgtgacccggtctcgctcctcctcctcctcctccttacgtcataatctccgccctccccttcagaaccgcgccccacagctcggcgcaggtcccgcccctttccatctacggggcggcaggaggcccgaagcaagatggcggtgaatcagagccacaccgagaaccgccgcggagccctcatccctaacggtgaaaggtgcctgaggggaagcacggcgtgctgtcggaggagaggagacgaatgagatagacatggcggctcgcaaactctcagcgagtcagggactttgccgccttttttgggcgcggcgctcttagctccgcccccgacctttgggagcgcgcgcccctcactggtgttccggcatgtggaggtggcggaggccggaacgcgtggcctcgcgcgtttgaggggtgggggtgggaatgcgccttttcaaggcgcggggcccagacgcatgtctcctcagggcggggcggggagggggtgcgagacgcgtgtgtccttcgaagagaggccggagctgaccggcggttgtgagcagccgggggccttcggtggcagcgtggctgcccttgggtgcctgcgactttgttggatgaggacaggtactgggtgtgtatctcctcctacttccacgaacaaggtgtcgctctttggtaagagggatgaggaggtcgagtgtggatcattctggaaagatctcaaactgttgtggggcttctccttggacctggaaactttctaaagccatgtttcctccttgctccaaccagggagatgtctgcttttaaaaacaaaattgaaaaaattgaggccaggtgcagtggctcatgcctcttatcccaacagtttgggaagctgaggtggcccaggagtttgagacaagactgggcaacatagtgagaccccatctctacaaaaagtagaaaattagtgggccatggtggtgtgcacccataatcccagctgctt

SEQ ID NO: 70266 - DNA, 915 bp, Homo sapiens
gctgggagtcccgagggcctacgggccgccttcggccccgcccgggctcagaaaaaggcagccactggcttaaggtcaccaagaaagagcggaggggcggggctgcggccaggctccggacttccagccgggtccgggttcccgccctgggctccccaaaaccgcagagccccctcccaccgcacttatcctaccgaagcgttcagacctgccgccgcttctgactcgaatccggtaacctgataagtccgaagcgttccagtgagggcggggcctcacgaaggcaacccttcgcgcaacctatcagaatcccccctagcaacgctgtgccccgcccatatgggtccggcctcccagcctccctaagcccttccccactgggctcccgccctgcgtgctagcgaggcaggcattggcagaacggactcggggctgtccttcgtggcccggaccccgcgaggcctgtccttccacctctgtggggaccaagagggcaaggatcgtgccaggctcaccgtgggcgctcagtaagcggccgtgcagaggacggttgagggctttgtgcagaggaaatgagagactgctctgaagcaaggcccgcctagtgagctgctaggaaaatggaagtctgggattaatcgtctctacaaggagggtgcgtgggaggcaccaaagcaggcggtcacagctcccgcaaaggcagccggctctccttccccgcctgacgctcagggactactcgcacagactgggctacttccttcttcattcattcatcaagtatttattgagaaactgctaagtgccaaatgctttgttctgggcattgtaggggcagaaaggtgtgatattttcccttactcatcccaaaggtcacagcggacactcctacaaataaaatataggttagcaaga

SEQ ID NO: 70267 - DNA, 2369 bp, Homo sapiens
gatttattgtgtcataggagtttctgggacccagctcttcctgagaggggtgggaagattggggatgggatcctcactcagcagtctgggtagggccctttgaggcagagggtcttcggccagtgaagagagatttattctgctcagagtgctggggtcccatcctttctccctggctgccctgttaacagatggtgctggaccttgccccggaaggggcttgtagcttttttacgtcaacgaaatgccctcctgtactctgtcttcagcagccaactcctggagctgccaagtgaggggttaaagaagaggtggggaggcagtgtggctccctgggaaaagtctgttgctttggttctcagtcctgggtattctaggagcttggacacgggattgcgtttcctgtgctaaaattctctctcctggctgggctccggtaaactgaagctgctcgagaaatcacctgggaactctcatagccgtttgtcacccagggtgtacttgccaggacctctccttgctactcttcccaaagtcgggaggcaaagcggctgggtcaccagagcctgaccatactgacgctccagggggaagacgcagaggccgggaagagacaccccctcccaaacacataaaacttgccccttcctagcctcggctcccctcactggggccttgggcaggaccgacccgcatccaactaggcctaaggggtaggctctgagcctcttacccctaagaggcggagatgcgcccaaggcgggcgcccggcctgttccccagccctgcctggaagccccgcagccactgcattttgtttaaacacagatagcacgggcctttctcttattgctacagtgttttgtacacggttaaaacactagtaaagctttttcgttattactccttccgctccctgggtttatttccacaaccggccgctgaggcctgttctgacggccgggcggacccaagaccgcggccacgcccagcaggacgcggactgagggagccggggctgcgccgccactctcgtgacgccaccatgccggccagtgacaaacacctccctcccgccgccccaggagccgccggcactgcgcgagtgggagggctgggcttctcgtgtactcctcaaactctcgcgaggcttcgggcggctttcttcccgagggcggcacgagggctgggcggtggggtgcgggtgcccgggtgaggggcggagctgggggcatggcgtccggagcggctcgctggctagtattggcacccgtcaggtccggggctctccggagcgggcctagcttgaggaaagatggcgatgtctccgccgcatggagcggctcaggccggagcctggtaccgtcgaggtcagtcatcgttacccgcagcggcgccattttgcccaaaccggtgaaagtgagtgtcctcctggagacggggcgaaggggctgaggccaatcattgtggggagtgcgtgagggcggcgctgattgataggagccaaggccaatcataacgattaccgtagactggaaggcggaccaagaatacgctaatgagttgctaattttgacaggtgtgtagaaaatggtaggtagacagaagatggggggcaaacgctgaggaagttggccttttacattagcttgtcctgagaggtgcggtgctctgctcctctggagtcagaagactaggccgtgtgcttctagcttagagcagtcctgtaatctctgccctgcctgtctcctagtttatgggatgaaatatgaattttgaaaggactctgtaaataaagggtacgtgggacgggcctcatctttttattagttgtcacctaatatttaattcatgtgatttacagtcctgatagatgtgcagggaattattacaatcacgggttttcaaatgaagaatcgggctagagcggtgaagctcgtatccaaggccagcgctgaggacgcagcatccgggtttcttcctggtaccgtccccaccaggtcctgtctttttccaacactgaacgctatcacatgcttgagtttttctagggaaaacggaaacagtcccttatatcaagcgaaagtttgctttacgactgcagggctgtgtggtgtgggagttaaaaaaacaaattctcttaaagctagtctagcctatgctaactcacacaattgactgtaggtccatgttgggaaagacctgccttatcaaaacagttgaaaaaaaaatttttttaattctaggaatacgagagaaatgttgctgagattttactgacattctcccaatccatctaaagtctttgagtgtaaatacatgcccactttcaaatacatctgtttctaaaatttttaaatcaaatttct

SEQ ID NO: 70268 - DNA, 2114 bp, Homo sapiens
ctgttctaagcactctagatattttaacttaatacagtaaccttctgaagaaggaattattattcccattttaaagatgaagaaactgaggaatagatgaaataactggcccaaggtcacacagctagttgagggcagcgcctgaagaaaagtccgtgctcctaaccaccacattctaccgccttttcacacacacaagcagggactcgacagccctgaggagtggcaccgtgctccagctcactcaaaaacacctctttctcgcactttgggaggccgagacgggcggatcacgaggtcaggagatcgagaccattctggctaacacggtgaaatcccgtctctactaaaaatacaaaaaaaaatggccggcgtggtggcgggcgcctgtaatcccagctattcgggaggctgaggctgaggcaggagaatgacgtgaatccgggaggcggagcttgcagtgagccgagatcgcaccactgcactccagcctgagcgacacagcgagactctgtcacaaacaaaaaaatccaacgggcatctataattacactctgcaactctagactttgggttctgggtacaacagtggctcggcctgggccctgggcacatcacttcacctctcggtgcctccgctgcctcacccacaaagtgagtgtgtcactgacagtcatcgtcctcccgccaattgcgaaggacaaaagagaccaaagctccgatagcacgtacgaatgctaggcacggccggtctgaccaccgcgccgccgccaggtccggcccatggtaggctcgggtgaccctcttcccctgaagcacccgcagtcgcctctgcccaagttggtgacctcagctgggcccatgagaaaccccggccgggccggctacgaccttgagcggcggcctccgggtccccacgtaagccgctacctctcaccagtgttcggcacctcccgataccaggcgcggtagagctcgcgcaccctccgcttggcctcgttcatgtcccgactgaaaatgggcttcacgaaggtgctggcggtagaagtagcttggcggacgccgctccccgccatcttgccaaagcatccactccacaaccccacccctttgcaagcagcgcgtgcggaccgcgggcgaatgtcttttcccattggctaaggaggaacgccccgcctgtatgctgggtgggcgggaggatgactctgaggctctcggattggctgggaagcctctctctggctgagcgaacggtgggtgctgcgcatgctcatctacagaaacgccgcttggcctttggactacaccatctgtcgctcgctctaacgagccggcgttgccgccaggggacgctcgggccgcaggaggtcgctgggtcgtgagctggcgccggggacgccgagcgactgcggggtttccctcagcgtcctgctatccggctgcccgccgcgctccttggtagtgtccgtgggcgcgcaggccttgaagaacctcctcgtggcgggaccccgaggtaactgctgaggcagataatggcgcctgggctgcggtggggcttgtcctgccgcctggcggctttctgcagggccaggatatacttacttttctgtaaaccaactcttccttagcgcaggagaggtgtcaaagagctggcgcgtctccagagccccgggaggaaggctgtaacggcagccccatcgtagacagggacattcgcatcccgagccctggatctctgaaaaccagcccagaatttggaagctggaaggaactttagatcgtccattctgagtgtctctcttcgctggcgttttcccactgaggttatgtaaacatgaagaggagcctacaagtgtcaaggaaaaaacgacagctaaccacagggcaggccatgggcaagatatctcagtgttctccgctctcataggtcaggtaggtacctcagcatccccattttacaggtgaggaaactgagatggcccagagtctaggtcacctgacagatcgcccccacctgcctgactgctgcctaagaggctccgtctttttctgaaggtgtagttgacaggagcctgtgagtattggggaagggccaggggccggggctgagcatc

SEQ ID NO: 70269 - DNA, 861 bp, Homo sapiens
gcccatcacccaccggagtggttggcgaaggcggcacaaaggcaggcggcctcctcggtcacccactgctccagcgacttcttgcccaggcccaagttgcgcaaggtggagacggagaagcgcctctgctcgcgccacgcgggcccatagcgcgccaggaacacccctgggggtgggacgggcacgtgcgcgtggccatgaaggcattagccccaccatccaccacccactccaaccctatgctccccctggtctcccgcagtccctggctctgtccagctggtcacagggcccactctttgtgcatccaccttgctcccttggctggggcagggctttgccccacctcgtctctgcccaccctgaccgcctttgcactcagggaagaccccgcgggccccgcgccacccacactgagcttacagcacaggtgcggtccccgccccccacttcgacaccggattccagctgggaaatgcgccagcctcacccattgggctcctgccaggtctcggcagtggccccgcccactcgtcacaagccccgccctcgtccccatgctcacacctccctagtgcaggtggtttcttggcccgctgtccccactcgctggcctgtttcatgtccacgaccccgcgccctctctgcccagctcggactacggtcatcacccacccgggtcccacggaaatctgtctctgtccccaccgctgcttgccttgggaacgcggcccgaaacccaggatctgggtgatgggcacaggcgggcggtcggcggtgtcctcgccgtgggtcaccagcgcctcgcgcacggccgccagcccattgagcacgaccaccggcgtccaggccagctgcagg

SEQ ID NO: 70270 - DNA, 1832 bp, Homo sapiens
aattcacgttcctggcaggggccagaaccacagctagagagctcagaaacctggagggcacaggggagcttctcctcttaccagtccctgctgggagggaagagtgaagagcagtaggtgtagtaaaacctcttctgaggactctgaacaggcaactgcacctacatggccagccagtcaaggtctctcaatctgtgttcttcaaggcccaggcaccatcctacactgtccagagggcgcagtcagcacttctgcatagtgaagtcaaagtaaacagcttgcgagatcatcatccaagctcaaaaagacctacaaggtggcctagtcaacaagatggcttgcagacacaaacatcaacccccagaagagaaggccactttcatttccctcttcaagctcaaaggcagaatggatttactaagctcctcattataagctctgtgaagcttcagatacccacatgcatccacatgctcccaggctgaggatggtgggctcaaggagggaggtaggaaaaacaagaagggtttaatgtcctttggatctgttgtgtagcagacacagactccaattcacctacactctaccccagtactactgttattccttatgttggcacactgcagggcttgggacacaggggcctgccagccccaccctgccttgccgaagggtaggctcaggctcctgggccataaggagggaaatatggggctcttggcactgggactggctcctgtgaggcagacggctgtcccccggggaggagtcagactactggcatttcctaatgacccatccagggctctgatggcaccagcaagatcaaagtctgcagcagagatagcagctttaaaatgctactgcaacgagagctgcagaaagtagaattcccagctgttttttcatgagagtagaagaaaaaaaaaaaaccctccacacaaggttctttacgcacagtggaattattaatgagctaccacagcctttttttctcgtcttaattgttgtggctcattgcattaaatacattaattaaaaaaaaaaaaaaacagagctcatgctcttattactgtaaccccccccacctggagccaaatcctgtgcctatgacataacaagcaacacaaaacagctgaccatgatgtcagaaatgcagggtcaacatcaggtgggggggaaggtggcaggagtcacagatcatgaaacaaagattctgtttctatggagatgtcccagtaataaaagtcttccctgagacatcaacagctctttaaagatctgggtgggttgacagcaaggcagagatgaaaatgttaaactgctctttactccataagggaggttagggattctcaaaccaaggacttatttttgttatgattagaaagaaaagtccatcaataaacttgtttcctggatacaaagttacatcatacacagagagcaatttccaagaagactgtgtggaataatacaagcgtccatccccacagagcagtgcaggcctctgggtcactgtgacttgggtcatcaaaaagaccgcaatgaccaagacatggtcatcttgtgaaactgcctctgggtcccaggtctccacatgaaggagcaaagtgcacagcagcagaggcagcaaagccagaggccgacagccctaccctcactcctcccaacccagacccctctgtcttgctggacacgcggccaccaacttctgttaaatagagatgctaccagcttaactaggcaggctaccaagatgggccccaaaacagaaaatgacagacaccatttactcacaagtcctcagctaataatgagggtcctgcgct

SEQ ID NO: 70271 - DNA, 1742 bp, Homo sapiens
tcctcacttaacagatgagaaaattaccagggaaagtaacttgccctgggctgcagtttatttggcgtcaaagctgtaagcagattcctggtctcccaggtcggaattcagtgtagcttccccatccacctaactgccaccccacggaagatgctgtataaaactcttcactcttcactgaggctgttaacataagggtccaattatcattcaaagatcagcctgttagataatagctcgaaaattccatccattttacagcagttaccagagacatctaatcttcgaggaaaaaaaagcaaaaaggaaaagggggaaatcctaattttgacctgacccctaaggtcaaactaaaggattgaatacagaccagcagaccgtattggtatccgcaaccacaaaaacagacaataatcccacccacaagcagaggaagacggccgctcctcggcaccgccccccaactcactaaattccactcccattccggcgtccagaggacagtgcacctcccgccgtagcctgagagggatcggcccgattggccacgctccttcaaaccaccactttcccccgaaaaagggacgaaagcctcaggtccccaaacgagcgctccctcgcccagagaccccggcttgcacaccccgccctgttccccgcggcgcgggaggagaggccgccccacacaggaagtgtgtcctgcgccgggaccttgcgcccaacccgccggtacctgccctccgcccccaacaggcgagaagcagccgcgtccacatggcttcaggtgttcacatggcagtaaacgggcccctgctctcctgggcgccccagcgcggcgccctcccgcccacatcccggcccagccccgctggcctcgcctccagcccgtagccaagaggcgagcgcggccggtgcccccggggctgccaggggccccgaagcaggcggcgctgactcccggacgccgcccgctcacacccgccgcctttgcacccaaggcctcgcgcgaccagcaggtagaccttccctccgcaccctcgggccagcaccggcacccaagccccgccggaaccccgggccggcccaagacaccttagccctctgatgccaggcctggcccgggcccctgcccgcactcttgggtcgggccgggcagcaacactcccctcagcaccccaagccctgactcggagtccaggaggctccgcactcccaggttgggtccggccgggacctctgctcccagcccccgaggccggacaccccggcccggccccagtccttcaggcccaaccctctccctgcccctcaggcccgggaggcggttacctgcaggagccccccgcccagtccctcggcctccgccgggggcgggcggggagggagcggtggcgacggcgggcggcgctgcgcggggtgggggtgggggtggctccgccgcctccagctcgggcgcccgggccggcggcggggcgggccggggccgcggcccctcgaggctcgctccggcccgcgcgctcgctccccggtcaggcgcgcctcagggcgggctcccctggcggaggccgcggccgcctcgcaggggccgaaagcggctgggctcggggttttttctctccattctcccaacacacaggaaataacagagcgtcaggtgacggcgcgcggccaatggggaggctccgggccgcggcgcgcgggcgggcgggagggcgcgcggcggggcggggcgcgcggcgggg

SEQ ID NO: 70272 - DNA, 1189 bp, Homo sapiens
agacagagtctcgctttgtcgccccagctggagtgcaggggcacgatcttggctcactgcaacctccacctcctgtgttcaagcagttctcccgcctcagcctcccgagtagctgggattacacaagtgtgccaccacgcccagctcacttttgtatttttagtagagacagggtttcgccaagctggccaggctggtctcaaactcctgacttcaagtgatctgcccgcctcggcctcccaaagtgctgaggttagaggcgtgagtcaccgcgccgggccaacagaattccccgcctcagggaacacctttgccccggctgttcccgctgcctggaatgctctttcccaagatctgtgcgtgactgcctccttcctgtccttcccttctcagtgcaacggcaggtgctctgtctgctgtgttcagagctgtgacctttgtgcctacatagcgcctgcaacaaggcagatacaggctcagcagggagccccgttcctgaggctggggctgccctataggggccccttgtggccactccagggcagagagaagacatctccgctaacccaaggacctgaagataaacttggaggtgatgtggtgcatgtctggaactggccagaatccgtctcttccggatgtgtgctctggggcagatgcctaatgcgaatcgcttctgtcatcaggacacctgggggcttgacacggaccagctgccgctgccgggggacaggctgccagagcgccgatgggctctcagcgaaattgatggccattgtcagaaaatgatttccccatggccacatcgcaggccctcggaggagcttgaatcccaggcatcgatgcctcctgcggcaggcgggcaggcggccaggcatgtgggcaggcagcccacacctgacccagctgcttcccagagccggggagctagcaattaccaggcgggaagaggaacccgcaggtcctgcacccaggaggcccaagccaagggctgagggctagcagggagcccgcctctcccagggagaacagggggtcctgccctgcacccctcctgtctgctctgtgcccacaagcccagtgctgactggcacagtgcaagcacccggtggatgtctgctgaatgaaggaaggaagaatgaactctagaaacttcagagaggattctggagcagcatctggagagggg

SEQ ID NO: 70273 - DNA, 1948 bp, Homo sapiens
ctcagtgctccctgagccctgatccagccttactatgagctgggaaccagacaggaggccttgccctcaagggactcgcacattatagttataataacgacatgcatgaatgtgtgtgtcccagctgcctgcctttccgaggccgtgtggtttgccgctttataagcacaaagtcattgaatccccgagagaatactacgcattgggggctgctaccatcatcttgctgatgaagaaacagagaggtgaaggaacttgttcagggtcatccagtggacaaggtccagagccaggatctgaaacaaagatctcactcccacactcatgcaggacagaaacctgcacaacccaggtcattaactgctcaaatcaaggtagcacttggggctgtgggagcactgaggaaggagaagcttaaggggagttcaggaagggactcacaggggacgttagtgagcagggacttagaggcatgaaggcttggacaggagaagaggaagggtgggccaggcagggatgacagcctggacagaggcccagagcaggggacaggaagctcaacccacgtccgcccccctgcctggatcctagctccgctcatcgccgctgtggttctcgaaggccctcttatcctctggcctttgcctatgctgttccctgtttgcatgctgttcccctttttatcctgtgctctaggctcagtagtgggtgacagagcaggatttgaaaacaggcctatgggactcccagacatgtgcctttccccatgcagtgccctgcctcacagagagagagagcgactcacacctggcgagaccgagggttgagtctgccaggaagagcatggtgagcagggggaacagaatgtggcaacatgtgagggcagactcaggactgtgcctgggtctgtcttcctgcccagcctggggtccacctctcacactccagggctccaaagccagtgctccttcccctggcctgcctgggggatggcaagatttagatagagaatgacttactgacttcagagtcccacagccctgggttagagcccctggccctcatatcactctggccaagttgcttccactccctgaaccttggctttctctcctgtgaatgagactgtacctgaagaatgattaaggaaagtccctggcacagagtaggtgcctggcaaataccaacggacaggagcctcgggacagatcccgttctgtcctggcatggtgccgtttcctagctagggagccagcaggctctgcagggcagggaggctctgcgcttagctaggtggtgttgcaatgagagcagcaaggtttctgagtgagccctgcccctcctggggccagtatcggtgggggctagagccctgctctccagtaactcactgtagccctcccagttactcaaggagctggccacggcccagcccagcggacagaggaggcaggtgtctggggctggttgaccctcagcctggacaccaccctccacacacaaggaggcagtggtggtccatggggctgctcttcctaggcagggctgttggaggtggccccttcccactctgctctgagagcctgactattagaggggacactcagaggcccaggaggtgacaatggcacttactgggcactctttgggccagaaagaggctgggtgctttacagagcctctgacagatgggtattaatatccgcattttggcctggcgtggtggctcacgcctgtaatctcagcactttgggaggccgaggtgggcagatcaattgaggtcaggagtttgagaccagcctggcgaacatggtgaaaccccgtctctactaaaaatacaaaaattagctgggtgcagtggcgggtgcctgtaatcctagctacttgggaggctgaggcaggagagtcgcttgaaactgtgaggcagaggttgcagtgagctgagatt

SEQ ID NO: 70274 - DNA, 665 bp, Homo sapiens
cactgtccacccgacccgcctccccatccaattcctcttcacccttcagctcacctggggatgcccctccttgggggagctccctctgatcggctagaccacctcctcttctgagcccattcccggaggccacccccactccacccactttgtgatttctagctcagagtctctctccttccccagatgagggctctcagggcacttgtttacacatgttgcctcagcacccaacacagatcctggcgcagaccaggtgttcgatactggccgtctctgcacggcacccatccagctatcgtttcattcagcaaatgtttattgagcacctgccctgtgttggagacctgagatacagcagtgggaaaacaggcagggcccgctctgactcaggtgacattctagtgacacgtatgcacatgtccaagccaagggccagtggcatagatgctagagggcaaagactgggggaagggccaggcatggtggctcacacctgtaatcccagcactttggctgaggcaggcagatcacctgaggtcaggagtcacggtgaaacatggtttcaccatgacctcaggtgatcccctgtttctactaaaaaatacaaaacttagctgggcatggtggcaggtgcctgtaatcccagctactcaggaggctga

SEQ ID NO: 70275 - DNA, 1510 bp, Homo sapiens
gtgggacgggtgccaaattggcctcttcgtccctcagcttcctcacaagtgaggtggagactccccaggcttccccggagccagggacagagtgagcgcttgatgatcccgtctaaaagtctcaaaatgagccccctttggtctcgctctgtcgccccaaatccctctcccgcctcagctgcagtttctccagctcccgaggaaggggggcacccgaattccagccgctgaggctggagtttggagttcgcccaaggagcttccgccctgggatgcggctgagacccgacaggtgggtcccgtccccgccccagatgtgcgcctggcccctcggaggcgcggctccgcctacgcccagacccttcctccccgccagcccgctcagcgcgctctggcaaactttccgcgtccagaacccgcccgcgtctacacctgctcgcggttcaaccgcaagcgcaagtctacacggtctcacctgcccccgggttgctgaagggtgcctcggtcacggggccgcgtctccacaggctcaacagctgcgagtccccgggactgccgacctcagccttggggatccgtcttgaccacccccggattcggaggcgcccgggccggaccacctgtgctggtctccacctcctcggcaaccccgggtcaccggagatgctgcagctcgagggtcccgcctgcaccatccatggctctcgagatccttcagagcgcggacccggccgagaccccgcggagccgctgcgcgtggctggtgcccgcggtcgccccgcagtcccgtatgcggcgaaaccgccggggctgcttacctggcccgcaccctcacgctcccgtccgggctgcgcagccgcttctctcacacattttgcgataacatcgatggcgaaagaaaatgttgtaaatcctcctgcggccacgtggctgtccccccacccccttctccctttctctggccctcaggacaaaaaggccccgcggccggccgctggccacggggctctgggcgggcgaagctggctgcagcggggcgtggtctggggaggggccggaccggggcgggcggggcgtggtcggggcaggggcggggcgcgctggttccggccgccctccccgcggaaaccgggcctgagactagggctcctgttccagctcttgattggtcggtcggccagcactgctgacgtctgattggctgagacaaagaagggactaaggccgtaggggtgggggtttgtggatttcattctttgccttttcgctccggcggtggccgctgctctttcggaccttcctgaactctgcggccttttcctctctgcttccgtggtccctatcataacgctacctgcatttccttgtccttctctaccaaacagcacctggagatagggacatggggttcgtgctgctcaccactgtctccccagggcctagcacacagtacgtgctcaaaacggttagttgaatgaattcgtggaaaatatgcatacaggtgtttaga

SEQ ID NO: 70276 - DNA, 1037 bp, Homo sapiens
ctcccaaagtgctgggattacaggtgtgacctaccatacccggccacaattttcaacatttattccacgtccaccatgtgccaaggttctgggaggctcgggcccttgacacaaccatgtccctgaaagagacgagcacagaaccaggaggccctcagacaacagacgccagagccaccaagtcccccactaacggtgccacccacttcccctcctggccacgcaggacggccccagggttggcctgtgctgatggtgccacctggtggtagacatgggaacgccctcacctgagatttcctctccgtgacccttcttccccctctaggggtcctgggctgccctgaggccaccgcctagcaagatcaagatagggcttgagcggcagtgggatagggcagtgggggttccgggggggtccggtgcaggcagaaccaagagtgtgccggcggagggctgtcggtacagggtgcagggcgtggcggctgcaggacctcagcttgcctctttaaatcccttcctgggcaccgcggtggcccggccctttcccctcgtgctgtttctgctggaaacgccgcacagtctcctcgggggcagccgccagcggaaacggttattggccgccaggcaagccagtcccatccttcccagcaactgggactttccgggcagggctccccagcgcgggttcagctaattaaggaagcaattagcctcccctgaggctattcatgcttcctcacccacagttctcaggttctgtgagaccagagcctcagtctcccgtgagcagagggtgtgtgtgtggctgccactattctgcagacacgctggctccaccccagagagttgcagggccaggaaatctgcatttaaacagaccctggctctcacacttcggaaactgcccgaagcacctctcaaatatgggacaggtttgatactccctccccctctccgttcccccgcttctcccttcttcgccctccttcccacttcctccctcctccccgccccttctgccccccacctgccct

SEQ ID NO: 70277 - DNA, 1177 bp, Homo sapiens
aaagaaagactttctttttactgaatggcactgacttaccaggtacatacaagcaagtggagtctggggaccactttttggctgttctagagaaagtgccccaaagaggattcagcagccagactcctgttagttttctcatctcactcagaaggctcagcctctgaaacaaccattccaggacttggaggcaggggatctgggttaaaggcccagctctgccgtttcctaactgtggggccttggcaagtgcaggtcctgtgagcttcaccagcctcattagcaagaatagttcatgttcccctgccacggaagtgccctgtgaactagaagagagcatgggcaagtatggggttagtctcgctaacagatcagccagcttctgtctgggcaattctgtcatttagggttttgctggggtggccccgggagtcgtttgggagttcacctatctccccaggcatggagaaggggtggtgtttctgaatcaggattctgagctgaactgcaaacctgactgtgctccaagtttcttggaccagcaagcccagctcccagagtcccgctgccctggcctgaacccgccgctccacaccccgggctctcggcagccgggcggctcgtgggaggaggcgccatgagccttcttgcatttcctgcttcagacttgatggattacagaggactcctgctccagctgtggggaactccagcccgcactttgcctccagcccgatggtgcaagatccagcttctcttcagcctggcatcaaacgtctttttgatcagcttttcatccattttctgaaaatgtagtgattgagagatgttctgaatcttgcagaattctgtgtcgcaccctggccacacatcaatgcaggcctgaacctgaccctgggtggactccctgctctctgccagcccctttctcacccctgggtccccacggcccctggctctctcccctctgctagaatctcgctgagggattggtggggagggggtggtcacgcactgggtggagatctggtgccccctggaggccggacaggaagggccagggcggacaaggtctttgagaactcggtggcatcccgctcctgatggcctgggtcccaccgcccctcccccagccttcctgacagcagaggagattgatggggcgctgctcgaatgt

SEQ ID NO: 70278 - DNA, 2374 bp, Homo sapiens
ggcaccactgcactccagcctgggcgacagagcaacaccccgtctcaaaaaaaacataaaaataaaaataaacatctgctgagagaacaaatgtctgagaaaacaatatctaacatatttacatcctggctatttacaaagacatttaaacttaatgtgtgttgggaaactattgggcaaagttctcacttcttcatacagatgaactcagctcacgaaggcttgaaatgactaacaacatttaagggtctaggggaagtttgggagacatgactgcaaatcacctccatggctcctcagccagctcaagcactttcttctccctaaggaaataaccaatctcctgcccaacacaccagtttttcaagcccatgtaggaggccaactcagccagcaattaaatcgcgctcagcccgccgctcagttctccgtggcctcgggcaagtcactctaccacttccagcctcaagttccccatcagtaaaaggtgggtaacatgaatagctagcagacaacaggactgtaaaagattaaatgaggcatcgtgtatatgaaagggctcagaaaacttaaaacgccgcacaaagagaggcgagtgttaacaggggccgcgtgcagggggatttgggcttgcgcctcagcttcggcggtcggagcaagtcacttccccgctactaaacttcggttgtctcaactctaagatgggtggagaccaggcagcgccgagatcacggagcggggcccaaatgccagtccacacaggcaaggaggctgcgccgccgagaccccaggaccccggaacgcgggggccccagggggcagcccctcaggtccacgaggcggcaccctgtccccgccgcggccccgtcggcctcccagggccgccagagggactgcgcctcggccagtgggcgggcggtcggggccacggcggggacggcggcagccggccaatgaggagcgcggctgtggtcgggggcgggcgcacccggtcctccgcgtcgctcccggatcgctacctcccccgcctcgagctccactaggccgaggaccctaaaccccgaagaaaggaaaggcctctcaccgtcctttcgccgccgccccgcgcttcctgatgagttcgtccagggagatgtccgccatcttgctccgccgagcaagccgaaagcagtcgagaccccgcgagcccgccccttcggccgctagggagcgacgaactacttccggcgtccgcggaccaactctcgcgacagccagctcaaagcaggcaagaaccggaaggggcggggacgttccccgtgagccttcgcggtgctggctgctcatctgcatacggaagttcggcacattatgaattatttattttcctcgagggaaaaaattaaatgaaaagcaacaaaatacattattaacaagtgagacaaacttcaatggaactggatcatgacctcaacagtcaactacgatagtcatcatacgcctaatgagaatagaattcattacctaggaaataaactaaaaacgtccttatgccttaaacttatgagtaaggaaaataacgattcggggtgacgcccgaatcctcactgctaatgtgagacgaatttttgagcgggtaaaggtcgccctcaaggtgacccgcctactttgcgggatgcctgggagttgcgatctgcccgaccttattcacgcctaaaaagtagactgactgtggggtggtcgtgttttttgtttcttgttggtaggtggtgaatgcgtttttttcgttgttttctccgttactcaggctgccagttgcttggcagtcttgtcgctggctgtggacgctctgcacttcatcaccgtccccagctgcgctttgagccggtctaaggttgcccacagtattgacgttgggacccacgaaactggcaatttccatgtgtgcggccttacccagttctcccaaacttctgcgtataaccgcttctctgtgcttcagaaagataagtccggccccggcctcacacagcagctcagttcgtgacagcgtttaatatgtaaaatggagcaaataatttatagggcgttgggagagttaaagagactaattcatttacgtgttaaatacagggaatggcttttgcattgatataaccccagcctccagcatgcgccagacctgacgtaggtgttcggcacatattttgtccaatcactctaaaaatacactccatgcccttagaacaggtggggttatgtcctcttggccatcaggcatcaggagctccgtgcagaaactgggtaagaggccaggagcggtggctcatgtctgtaatctcagcactttgggaggctgaggcgggtggatcacctgaagtcaggaggtcgagac

SEQ ID NO: 70279 - DNA, 675 bp, Homo sapiens
attacagacatgagccacagcgcctggccaatttttgtatttttagtagagccggggttttttctcattggccaggctggtctcatcgaactcctgacctcaagtgatccacccgcctcagcctcccacagtactgggattacaggcatgagccactgcacccagcctatacgtggactgtcaactatacaggtcagcccctaacccccataccattcaagggtccactgtatggatatgcacacatgtagtatctaatatatttaacatacattagatatatactgtatagagagaaataaagcaaatgtagcaaataataacattaggtacatctgggtgaagagtacataagagctctttttttttttttgagacagggtttcactctatcacccaggctggaatgcagtggcgtgatctcagctcactatagccttgacctcttgtacccaagcaatcctcccagcccagtccccgaagtaactggggctacaggcacgtaccaccaggccttggtaatttttttgtattttttgtagagatgcggtttcaccatgttgcccaggctaatctcaaacttctgagctcaagccaacagccagcctcagccttccaagttctaggattgcaggtataagcccctgcgtccagcccataaatgttcttttacag

SEQ ID NO: 70280 - DNA, 1749 bp, Homo sapiens
cttccagtgtctgctcccaacaacaggggctgcccggagccaggcgggcagcctctgctcacgccacctcattcagtcctcaagcctgttcatgactcctcccacttcaggtgaggaaaccaagcctcaggggacagacttgagcccggggacactttctggccactaaagagaaggggtgggctttttataggtaaaagttcttatctggggaggcagccacaggcagaccatcaccgtcggtcagtcgtttagtccacaaaccccagtgggcactgaggtggcaggtcccatgtgcaacgcaggggacacaggccaggaggccccgcccgagttcaagccagacggggagacagacaccggcagagagggcgcaccacagccaggagcagtggaggggcgaaggtttcacctccagaaagccagaggccctgccagactcacacggtggggtgcactctcttcctacccacacgggttggaacaggctctgccccgtcctcgtccacagcaccaccccaaccctcaccagcagtgggccaagtaaacagaaggcaggtggctgaggccaaggtcccacccctgtgcctcctcacctgtgctgcgtgcacactcacacacacactcacacacacagaccacctcaccccagccacctgggggcccaggagacagctgcctcccagcccctgacctaatgcccacaagccatgctctgccccaccagggaacccatcacccgcctctccttgcctctaataacacagaggggaagagggacacagggtgccagagtcccagggagcccccagctcatgcaccatagctgaggggctgcgtagctctgctccccacacatagaatgccctgcgcagctgcccacccctggaattccccactgggaccctggcctccactctgcccaggccaggttaggggtgggcagagagagctgccagggcccccgacctggcaggcccggtcctccccaggtgccagctccctgccctggagcttagacaagccagtcgggtgacttgcttacctgtcccctgcctgcccgccagcggtcctgccagaatctgagcggcacctccctcctggtcctgttctaaccgggaggaagtgggagggagtggaggaagttctgcagtggggggctctggcttggctgggaactgtgggggaagggaacccaggagaaggaacaggtggacacagagctgggatctgggccgcagagtaagcatggggctgccagggacagtaggaaagcccggcagactgtacctgtcagcctgtcagggtcgctgagcactcacagccgggctgggaggcaggggaaccacagttcaggatggcagaccaagctccaatgttttcccagtgtggctggcagactccagggccaacccctggcctggatcccacaaagtgttgggagaggcctcccatggggcctgcatgtcttagataagacacctagagcaccaggcccccagccagcctcctccagactgtggggagcccgtaagccaggaggcctggctcagaatgtgctggagacattctgggccaagcgaggatcccagcagcacccacaaagggtaatccccacccacccttggagagatggggctgggcgggggagggttggtggaggtctcccgactcccaggcagtgctctgccccttacagaggactgctcagccattcaacagaaatatatggaatgaggccaagaacgg

SEQ ID NO: 70281 - DNA, 2210 bp, Homo sapiens
gggaagctttagagacacaggcaggacatttcaacaataaaggaggcagatgctttctggggaaaaatgggccgggtgttgcatggaggttggggtgatgcccacaggttcaccctggccaaggttgcctggggtctgaacatcccgaagttctgggttgggccacactttccttagcaaccacccaagccaagaggccttttgcctggatccccaaggaggagactccaggtcctccccaaggagggaggacccaggtgccctccaagtggcagatgccaggcatagaggtagaggtggaggtggaggagcactgggctgattcctcctgtgccagcctccccacgcctagcgggtcacagttgacaggagagctgccctctgcagccgcagcctccacatgtccacacagactcaagcctccagcctcaccatggtcaacttttgagaaactggggagaggaggtggcctggggggaagggaaggtggctctaggccagcccaggagtgacagcagcagagtggactttgaaaccccatggagcaggctccttccggcggcagcgttgtgggacggtggccaagactagtttgcatttccccatctgtgaaatggggcaaacagcactgacaccgcaaagtgtgaggtccccagcacagcttgcagggtcagtgggagcctggccttgatgggagcctggcccactgagcattgggaggatgcccccgtgtcatccgggttctgttccttgttgctaaacgtgcaaaaccctctgacatagtgacatcgcacacacacacacgttcagtcgcagtcagtgacatcgcccattcacatactcccgtacacacacacacaccccatcacacgtttccatgcccgcccttcacacccacggtcacactcacacacacattcactctcaagccattcacacgctcgctcacacactcacactcagcggcacacacgctcacaaccacgggtccctccagcagccaaggccccacggcggccagggcagggcccaggtgcccccgggtgctgggctctggcgcgccccccgggcaggagggctgggtccccgctgcagactgccagggcgtaagtagcggtcaccacgtagctcgcccaggcccttgtggggtggggtggggcgcggcgggctgggcgggcgaagtgggtgcggccgggtgcggcccgggtcccgcgtcacctcccgcaggccagcccgccccctcgccgccgggtcccagtccctcgcgacgccccgcggccccggcgccccctccccgcctaccgtgctgagctgggcccccatggtggccccgcgccgcgctcgctctgtcgccgccgccgccgccgccgagaccgtcgcgcccgggcccgcgtcactccggagcaggggcggggccgaggggccaggcgggcgcgcggggcggggcgggcgcgggggcggggaccgggtcgctccgcctgcttctgccggggatggagactgggaactggggatgcggccctctgcgctccgagctctcccgccgctgtgctgccccgcgcgggacggtggcctctctgggcctcgttcgccgccataaaggaagcaagatggcgccccccggatgggagcgagaataagaggcggaatcttcccccggcctccgagactgcaggggccggtcctgcctggcctggcctgggcctgtgcctgcagctgctcagcgcggcccttccccgggcctttgaatttgtagttccctgggcagcactgttcccagctgcctcgggccgggttaaatgctgcggtctcagcacggcccgcccggagcctcctcgccggcggcgcctccgctccccacgccattgtcccactgtggagtgatctttgtcccacttagctgaaggcctcctgcgtgtttcccccactcccaccccatcccagtggactgtgcgctcccggagggcaaggccctatctggtttgaagtcccgtacatccccagagcctagccacacagagcctagcatatagtaggtgctcaataaatacctttttttttttttttttttttggtaaagcagggtctcactcttgcccagactggaatgcaggagcctgatcacagctcactttagcctcaacctcccaggctcaagtgttcctcctgcctcaacctcctgagtagctgggcacatgccaccacgtccg

SEQ ID NO: 70282 - DNA, 803 bp, Homo sapiens
gagaggctgaggtgaatggatcacctgaggtcaggagtttgagactcaaaaaaaaaaaaaaggaaaagaaaagctagccgggcacggtggctcacgcctgtaatcccagcactttgggaggccgaggcgggtggatcatgagttcaggagatcaagaccatcctggctaacacggtgaaaccccgtctctactaaaaatacaaaaaaaattagccgggcatagtggtggatgcctgtagtcccagctactcgggaggctgaggcaggagaatggcgtgaacccggaaggcggaggttgcagtgagctgagattacaccactgcattccagcctgggccactgagagagactccatctcaaaaaaaaaaaaaaaagaaaagaaaagctaacaaattgtccagttgcatatttctctctctctctcaaaaaaaaaaaaagatggggtcactggagacccctcattgtccataccctccagctggcttggtccccagttccagcaatcctgtcctctggctgcccccaaccctggcacaggactgtgccaagggtgtttattttgcccatttattgatctgggcctcagctcccaacacatttcctttctggggtttggatctgcttgcaacagccaagtgaggccccagaacttgctgctttccaggggacactgttaaaatgtccttttttctgccaagcttggtggctcacacctgtaatcccagcactttgggaggccaaggcaggcagatcacctgaggagttcgagaccagcctggtccaacatggtgaaaccccgtctc

SEQ ID NO: 70283 - DNA, 617 bp, Homo sapiens
ggcatgagccaatgtgcctggccagaagcagttgttatccccattttacaggtgaggaaactgaggcacaagcaggtgggtaacttgcctacagccacacagctgttggaagagggcccagagttaaatctgagcagtctgactctgagccagtagcaaagtccaaaaaccgttacatttttgccttgggaagtggatttggcattaacaacaaagtggaattgtgcccaagatgctagggagttcaaataaaacaaaatgtgacattcttcatgctgcagcatagtgcattctgggaaatcatggcatacaatgacttggatttttcccagaggaaacctctctagcagacctggctagttcctccccagcacccactccactgtcatacaccacaatggggttttcaggtcagcacctggctccctacctagcaactgtttttcccagatcctcttgcaaggacgggcagtaagggctggccaatgggataagagaagaaagaagtgacataatgatctctgggtcaagtcagctggctcagtgtgggtgcaacagcaggagctggagcagctgctttggaccatgagatgagagctgagtgttaaggaacagag

SEQ ID NO: 70284 - DNA, 792 bp, Homo sapiens
taggtggcggtgctgggatttgaacccagaccttcactgttctgtgcacagggtaggaaggaggctggctggggagccgagaaggggtccagtgcctgcctcggggggcagctaccactcttcacctccctgcgccaacagccacagaccagagtctaatgtccccttccgagcccccacagctaccggaggagtctggctcctgccctctgccttgggggattccagagggaccttgcactttgtcctgcccctgcctaacagagccggctgtcgcctgaggccctggtttcctcaggctgcccccgcctcaggagcaggagctggaacagttgttgggcaacggagttctgggaaaggaggagggaggggcgctcgctctggtggaaacctgccctggggaaatgtaatcagatcctcagagcagcggtttgttcctggcttgtttctagtgggtgtgttcacagacgtttttggccaggactgagaaagacgtggacctatcctttactgggggagcactgcgtggcctggggccggtgtccagtcggttatttaagaatcttcccagctggccaggcataggcaagcagggagtcgttttcccagcagctctaggggaaggaaaataattcccccttgctggtgtatcaatattcaacttcttgtttaaatattaaattgtaatgtcctctgagtgcccaacagagatcggggatgagtgagcccccgtgttcctggaagtctggtttcatggttcacttgttcctaaatctctgcttgttctaactt

SEQ ID NO: 70285 - DNA, 1215 bp, Homo sapiens
agtgagtgaccagtaagagtgaaccaatgagtgtgtagatcgctgtgtgaccaagtgggccagtgcgaaaggtggggggcagaggccgggtgagctccctgggatgcgggtagcaaggacagggctgtggtgtgaaccaagacatggtgccccctgcccctgtctttcttctgcagggagaggggctattttggtcctgagtacttttaaccccatgtgaaccacgcggacgggtggacagttggagggccagtagcagcagcaggagcctctgcccacttgggggccccgagtgctggcatgatctgactccatggtgtgggcggggtccgggcccacttggaggagcaggatatgtcgtcggaccacagttgggggtgccagactcaggccacgccatatttggtgtcagagcccaagacccaggaatagaaactgtgtatggggccaagttggccgcagcccaatatccaggtgacctcaggcccaaagcatgctcctggcccccgagacgggcctcgcagttgcagcctatgtcctggaccttgtcagctgggcttggcacacccctgctgcctgcccctgcctccaggctcactacttcccgccctgtcaccagggagctactcccagttagcctgttactgtggccactcccctgctctaagcccttccatggctcccatcgccaggattccccatgactcatcttaggcaggaagtgaggagagaggagaggtgcagggcatggccgggcgcggtggctcacgcctgtaatcccggcactttgggaggctgaggtgggcggatcatgaagtcaggagattaagaccatcctggccaacacggtgaaaccccatctctactgaaaatacaaaaattagctggcatgatggtgcacgcctgtagtctcagctactcaggaggctgaggcagaagaatcgcttgaactcgggaggcagaggttgcagtgagctgagatcgtgccactgcactctagcctggcaatagagcgagactccgtctcaaaaaaaaaaaaaaaaaatcgagaggtgcagggcaatggagacagaaggccaaaggctgggtcagacccctaccagccaggttcttggcaccagctctgcagaccccaactaggggcatcagcatcaggggctaggcccaagggcctagaaaaggccctccaagctggtgcttttcatccctacacaa

SEQ ID NO: 70286 - DNA, 560 bp, Homo sapiens
caagagcaaaactctgtctcaaaaaaaaaaaaatcattgacttgatcctcagcctggtcaaatcgagaagcagcactcatgctggaggggccacatagcctgggctcctgatttgcagggccatggataaacacacacacgcgcacacacacacgcacgcacagcccttccctgagcttgggtgctcagtgataagcagaacaaagtcatcaaacattcctccctcactcctgctctgcataggggctgagagccaagacattggtagctttgtcaaaatgtcaaaatattgctagtcattgggctgggcactgtggctcatagctgtaatcccagcactttggactgatgactttctttctttttttttttttttctttttttgcgatagagtcttgtgctgttgcccaggctggagtgcagtggtgcgatcttaacctccgcctcccgggttcaagcgatccctctgcctcagccttgcaagtagataggaatacaggcgcctgccccaccaccatggccagctaatttttttttgtatttttagtagaggcggggtt

SEQ ID NO: 70287 - DNA, 1472 bp, Homo sapiens
gaacacacaaagctctttgttgaaatatgctctgaataataaaaagtaaatatttaataaaagttgctggtgcctgtaattccagcttcttgggaggctgaggagggaggtttgctcaaggcccggagtttgagaccagcctgggcaacacagttagaccccggcgggggcaggggagtgagtttctgggtggcctctcaccccagggtgcaccttacaatgaccacgaggtgccaggaaccagggttggtttggcatccacacagggtcaaaaaaatttaatggatctttgttctctgaaagggaacaggaaggtaaacacaggctgccactatttttgttcagtaactggaaaggctgctctcatttgatctccaaatatttttttaaaaaaacaaacagtgcttcagagtaaaacttctattgatttaaattacaaaggcatccattgcagggagtcaggggactgaacaatgcaggtctctggaccggctgctggctgtgccagggcccctacaaggcgacccagcactgacctgtggggctgctggaggtctccaaaggtggccggagtgcctctctgccaggggtggtcacaaaaggaagttgccctgacaacaggccaggacactgaaagtttggagatggaacaagccaatgagcctcacctgcccccaccaagactcactgccaggaaatgcccagtcagcaagtaactgactgcccaagggaaacgaggcccctctgctcaagtctggggtgaggcacagggtgtgctcctgaccaaagagtggctcaggggagccgtggccctggctgcgcacccccaggcaccctcacactctcactggcagcggatgtgccggggcttgtccactctggccctggcctctggctccttgggctgcctggctctctgccagctgctctgccaacacaacccttgtctcacttgctgccacctggctaggactctccctccactgcagcacagcaacttggcagtgcccactgcaccccgagggccacagtgtgtctctataacatccccaaaccacaacccagaatgtccgacactcagacctctctcgagctgtttctctttggactctgaaaacagctgttctctgtggctgtaaggccaagtgatagcctaggttggtcacttagagccacagccagctcctctaggcctagggatgctgagggtgccaggcttggaatgcctggctcctgagagtcatccctccccttggctctcctgctgataaatggcttcctgaaatgacctcagaggacgctgcccctttcacgttaaccacagggcccctcctccccactgtggcctggcagaggcctttgtagggtactctcacaaggcatccctcagtcagggggaggggaagtcgaagcagaggggccggcgctctgaggcccaccactgggctcacaggccgccccatcctaggcca

SEQ ID NO: 70288 - DNA, 2824 bp, Homo sapiens
agcctgggcgacagagcaaggctctgtctcaaaaaaattaaaattaaaacgttaaaaaaaaaaaaaagaacattaaggccagcatggtggctcatgcctgtaatcctagcactctgggaggccaaggcaggaggaggcaggaggactgcttgagcccaggaatttgacaccagcacgggcaacatagcaagaccctgtctctacaaaaattaattaattaattaattaataataacaattagctgggcgtggtggtacagccctgtggtgtcagcctcatcaggaggctgggaaggaaggatggcttgggctgggtaggtcaaggctgcagtgagctaggatcaaggcactacacttcagcctgggtgacggggtgagaccctgtctctaaaaaaataaataaataaaaatgtgaaaatcaagagaacagtaaagaaacgggcactggagaattcctggagcctttctcttaactttcccacatccatcagacatcacctccaataaactgtttccttcctcacctaggctggaaaaaatatgggctcccctgtaccatcaagacttaaaaccaacagaaacacctattttgtaacactcgggaactttctatgccagcatatcgaggttcaataacagctgttcccttcgggaagtgacagtgggaaccagacaacactcgtgtcacaggaggggcggggagagcccacgctgacgcgacagccctttgcactctccaagtccctctccgacccgacgtgtcaccttagccccctgcgtcaccccaacgcctccagccagctgcgcaaagctgtaaaagttccagggagagaacagcctctggagacaaaaaaaaaaaggaaacctccatctccaaagagaaccgaggagagggaggaggctgtggtgagcctccctggccaaagcgacaaaagctggaagccaaagcgtagactactcggcaactttatcagaagagaaactgaggcaggcaccgcaaggcccgaggagccaagccggctccaacaggcggggtcgagctccagggtggcgctgggggagccgcgctttccccgcatccggcgccagcagccggggtttccgagccgggagctccctcctcgcagcgcccccgaggatgcccccgcccccgcctccgctcagagccgccggtgctcgccccccgccccaagagctcgccggggggtgtgcccgcgccgccgcccccgggaacgctccccggctcgcgtgaggacccccgcgctgcggcctcccgcccgggcctctcagctgcccggccccgcccgccccggcccggccaggctgccgcggccccacagtgcgacgtgtcacaggccgcgccggccccgcctcccaagccacgggcactggcgcccgcggggcctcccgccggttcccgcagggatgccaggcaggcccgcactcgcccgcggccgctaccttgttagtgggcaccgagcggaggcgcttgaagatggtcaagatgtcctgcttgctggggtcccccatcgtcagctgtgagccgcggcgcagctggcccagccaaccggtaagagtcgacgaaaagcggctaccgcctcagcaggagcgacgaggccgcgggggcggggctgcgcgtaacggtcaggctccgccccaatccccgcccacgaccgggcccgtccaccgccggggcgcaggcgccgctcgctttccctccccgccctcgcttcagccgcgccgctggcccgaccccaggcgctgcacgcgcgtgcgcaggaggctcgcgcgccatttgcggcgcggctccacgcccttagcgctgggcgaagccgggcccgggtgtggctgcctgccacgcgcgctgccataggatccaccaacgtttcgcctggtcgatcgccatttcgcctaacgggctgcttccatggaaaggtcagaggcaggggaaggggcgcacgcgccctccttcggcacgagacggacggagggcccgtgccttgacgccggaccttagctggtggccttccctttttttttttttttttttgagacggagcctcgctctgtcccccaggctggagtgtaatggcgcgattgcggctccttgcaacctccctggttcaagcgattctcctgcctcagcctcccgagtaggtgggattacaggcgtacatcaccacgcccggctaatttttgtatttttagtagagaccagggtttcaccatgttgcccaggctggtctcgaactcctgacttcaggtgatccacccacttcggccttccaaattgctgggattacagacgtgagccgccgcgcccgactctttttaattcttgccctcagctcacgccaggccctgggtggaaagctttctttgcccggaaactggctttctgaaaccaagggcttttgtgtcacgttcatggagagatggcagtgcgggttgaggcagaagtgctcagtcagaactgatgagtccagatgagaagcttgacttttaaccccggccctcggggctgcaccctaccctctgggaaacaattccagccagaagagtttacactcagcagaaggtgcctctgtcaccacaatgggtgtggagccactggaaagaggttgggtgatagtgaggaaggacagcaggttttggcatcaaaggcactaccttggcctcaatcccagttcagccagctgcttcctagctctgtggccttggtcaagacacttaccttctctaaagcatggtttatttgcagtctcaggggctcatgcctgtgatcccagcactttgggaggctgaggcgggaggatcacttgag

SEQ ID NO: 70289 - DNA, 676 bp, Homo sapiens
ctgggattacaggggtgagccaccacccagcccagtattgtccgtcttgtagagtatttgcattctaattctctttgctgttcgtctttcatgaagagatcctggcatagctatggccaaatgaagcagcattgtgtttatttagttcatttactgtttaataggagcttgctgaaagccaaatcccaccctaaagagaaaccagacatggctacatagtcatatgatgaatcacaagtgagaatacgcacagatcctgtcccttgcccctggaagacaacacctgtggactttgcttagtgccaagcgaaaacaagtgaatgctatctctttgacatattctttctgtataggccagatacatttgaaatgaacttactggggccaggtgtggtggctcatgcctgtaatctcagcactttgggaggctgaggcagaaggatggcttttggccaggagtttgagaccaccctgggccacatagcaagatcccacttctacaaaaaattgaaaaattagcggggcatgatggcacgtgcctgtagtcccagctaatcaggaggctgaagcaggaggatcacttgagctcaggagttcaaggctgcagtgagctatgattgcatcactgcactccagcctgggtgacagaacgagacactgtcagtaaaaaaataaa

SEQ ID NO: 70290 - DNA, 2837 bp, Homo sapiens
accccctaggctctggctgggacaccctccaggagacagactgtcaaatagtcctccccactgtgcccctctttgggtataatgggcacctctaagggacccaggcgaatttcacaggtggtttcctgtgccactccgggagcagcaaatcctcgctgtgtctgaaaccccagctgtgcacaaaacacgtcagccaagacttcctggtgtgtggctccagaggagaggctgggctttgtgctgtcccctctagggccgcttccagtcaggacggctctggccctccatgctctctcagtgcctctgtggaaggggcacagctgctctactgcctcctactgggagcaagtcctggggctggcgcaggggagtgctcggcagcagggcccacactgtcatttggaaaaaccttcctgttaagggccataaaagaagtgcaggagtaaggactgacaaaactgcaggctatgaggcgcccaggaggtttctgagtggtgggcctgggtcaatagccctgcgtggacaaagtcaccatgttccctaacagcccccgacaggagatgggtgctcttgtcattcccattccacacgtgggaaaactgagtcacaaaaagggcgaatagtttgctcagcttcccacaggtggtcagaggtgagcagaatctgaatgcagcccgggctctggccgctgctgagtcggggaagccacgaggcccacgcccacagcagaggtagtcgccctcagcatccctgctggggcagctgacgccacgtgcttaagcctcaggggcaccaggacctttgcccactgccttcagggtgccaggtggggcctagtgaccaatccaagggctaggtgagtcctgagatccccaggcccttgcatttcgaatgtaaagataatgaaagcttagacccacatgatgggaaaagaagaacattcattttgaatcaggattcactgaatttactgcctggagtagggaaaagtcctttgttggaagggtagggagggctgcccactgagaccacctcccctcccctggcccaccgtgaggggagcactgtggctgctcccttcctggccatcccacagggtgggtcagggacctgaggtcctgtgtgcctacggctcctgagactgactaggaaggaagggaatgccagtggccaaaaagtgacagtcaaacattcccaactagagaggacataaccgcgacttcaggagaggttcagaaggccttcggtaatgcctgcagccccccaggactctatgccagaacttggtctgtactatagctatgcctaaaggctgcctgataaacagggcaaacactaacatagagtctagaatgagaaagacatcatctagcaactctgtgggcccaggtcctcttccaggctgatgagctcatgggcacaccctcctcttacctcaaactgcggccagttcatggccatgcccggcccgtgattggctcggaaccacctcaggtcctccactgcatcagctgctctgatgctctgctccaggtcatggtaaatggctttgtagctaaatcagagagaaacgtggctcttttagaaggcaggggccagctaccctttgtcccagcccagtgccagccacagcaggtcccgtggtctctgccctctgtgagttggtttcacagacagagccagaacactcctcccttggctcaggtggaaggtcacgggccgccacgtgcacagatggctcctgacaaatgagctttaaatcaaaccagccaagcaggtggcaatgactaagccctgctctgtgtcacatatgcaaaaggcaccagcaggtgggctgtgtgggccaccactctgtgtggtcccatttcaccaggcccagagttgaggaagagaaaactggagggtgttagaaagtacccctccttcctcatctctgtccagaaaagctttatacccagacttgccaatgcagagcgtgaagatgacccggtgctgaacacacccaccaccaagacggggtgggggctgccttccgcctggcagccatcatcggctcaccttcctaggaagctgccctgccagggaagagtatggatcactgctggacctgatattttcacttataatctttatggctggtgagtcatgtactttctctgggcctcggtttcctcctccgttgagtgggcatgatcccctccatcaagggttgaattgtgtccttcataggagacatgctggagtccaaaccccagtgcctcggaatgtggccttatttggaaataaggtctttatagaggtaatcaagctaaaatgaggtcactagcaggggccctaatccatatgactggtgcctgtattaaaagggggaaatccagacacagagacagacaagcatccacacgatgggagtcactccacatgcagaagagcctgacacaggccagcctcaccctgctcctgccagcagagcagcctcgggcaagtcatttaatctcacccagcctcagcttcctcatcaataagatggggtcagtgccacccactttacaagactatcataaaaatggaatggtggcagagcagcagcggtgcagtaactgttgcttttgatgattgttacacagagggagacaaacggaatgtgtctcctattaacagcaagccttgacccgtgacgcatccctacacggttctgctagatggatgacagtaatccacgtccttgacttagctgggacctctgccctggtgaaggcatcacagaaccaaagatgaggaaagcacagaagaaacagcacagcttccatatcacaattcagaaccaagtctcagag

SEQ ID NO: 70291 - DNA, 1358 bp, Homo sapiens
gaatcctgcagctctcttggagcctcactgtcctttatcagatgaggacatctctccttcacagtgttctgatatgtacatgatggggtgcaggaagaaggcattcaaaaaaagtcctccttctcttgtctttcagcccactccatccccctcacacagctgctccctcccagattgtcccaagaaggggttttacaaggcaggaaatgttaaaaagcaggtgtggcctatctcaagaatatccaggggcagctagaaaacgtgtgaaattcctaagacatggctaaagtgggcacattcatctggtggggatgtgcctcgaggtcaatgacctcacactggtacacacttccccgcaccccctcatctcagcatgcagggccaccagtttggtggccaggtggttttgttagttggtgggatcatggtcgtgttgtccccctggggtgggtgagagatagcagggctggggccacctatttattgcaattctttctactatgggggtagtcacgggctccactcaggtctaagctttgctgtccctaacaacatgtgcagggccttctgaggaaggatggagcgcttcccgagacactgcaggcctatcgggcaccctctctgcccccagctgggactgagtctaccctgcccatgcggctcccctcccagatgctctcctctgactcacgtggctcagagccctgggagactctgcttcaggctccaaagcaactcctcttcttgaagccttccccagcctcgtgagaccaggttccaccccgccctctagggccctgactcctgcccctttctcctctcctggtatccgggtccttgctctgcttctcagcctcctaagatggctgggcttgggtcctctgtgccaggaaaaggccacccctgccagggctggggcatgcccagcagagaaagagctccacagcgctgtggctattcccctattccccacagccatccacactgcccgtgcccactacctggcagccctgcatgggagcctagctcagaagcccaagacacatagctgtgggttcagcgcccagcatctggaggatactgctgaagtgacacagagcagccccatctcaggagccttcaagacacaatagcctcccgggagctctcagggtactcagtggcaacaagatgctccacctctgggctgcccctgccctcagcctgtgccgaccctgctagccccaagtcctgcccccagcacaggccaggtactcagcagggtcatcactgttctggaaatccccttgcagggcatagaaagttctcagcgaacacccatggagtaaaacaagaggcggccttcacccttaggtgga

SEQ ID NO: 70292 - DNA, 2376 bp, Homo sapiens
agccttgaactcctgggctcaagcaatcctcccgcctcagcctccaaagtagctgggactacaggcacgtgctaccacacccaactaagtttttaaattttttgtagagatgaggtctcactatgtttcccaggctgtgtgctggattttggaaactgcgtcaagaagggtggtggggagggactggcctcctctccagagctctaggcacacaaggacctctcatatcctgcagtcactggccagaccaaagaggcagggagggtcccaggagggaacccactacaaactgtcccagtcatcctgccaggcgcttatgtccaacctcgagccctgggcctgttctgcaaaagcctgagttgatgttctgggtggctgtcaaacatgaaaggcctcttcctctccatctctgtctccctttctctcacacaggcacgcccccgcccaacatggagaagccccatctttcctctaggcacctttttgggcacctgattccctgggattctggcaaaggcccgagagttctcccggaccttgtgcttcttgagcccaggtgcctcccactcagtagttggttccaggctcctcacctgatcccaccgtggaggcacctgggctgcttcaaaagcccagattcctggctccagcaatgggagtgagaggggtttcccagaggattctgacacttggtctgagtgacgaactctcgtgtagatgacgtgttccccttgctacaccgacggcatagcagtgaggaacagtggagaaagggcatatgtatgggcttgaggtcagaagttcctgctctcacctgctggatggcacgtgacttaacctctctgatcttggtttcctcattcacaaaacagggatgccaccacctaactgacaggggccaggaaaggctggtgggtagtgaaaccagcttaggcctcttgcctcccctctgcccatgtcctcttcctggagtgcagcctctctctacctcattccgtctctctctgcaaatcctggttgggaatctcctctccaaacaccgaggcagggcaggccctcggcaatcacaccccccagccctcacccctcatggctgaccaaaggaggggaggtggggccgagggctgagcccctcccttcctgtgaacttttaaatcacaagacgatgacgctgtctggttttaagtcctgtgactccaggaccttccaggcagaatcacttatctacacctgcggagcatgtaatagtttacacaatgatttctcattaacccatggggcagaaaatctccgcttcacaacagaaatggaagggcacccatgatgccacagtgcctggtcacggtctctccttggccaaagaccacccttctgccacccctggctccacagcctctgcctcactttcggggcctgtcactgtggagactgcagggcccctccatcctccctcccacctggctcccccagacaagcgctcccagcctgcagtccctcccccaggtctctgcccccagcccctctccctacacaagcagagcaatccttctaaaccatctcaccctcctcacctcctccctgatcccacccaggctcaggccttcctgagtggctcctggtcagcagcatcctaagctccttactcagcctggctgtccaggccactggtgatttggtcctcataaccctccataccagctcacaccacacccattcacacccaccactggccacaaccattcacacctgccaccagccacacccattcacacccaccactggcgacgcccatgttggcacaagcagctccctgcagcaatcccagctgtccttgtgtctctgagcaccaagagctgtctcttacccctggcttgcccagagcctggctctgtcccttgactgagcaggtacagtggctatggtgaggcgaggtgctagggcactcacctgtggccttcttgaggacaggggtgtgttttattggttatttatccctctatccacccattcacccaagcagttacagaaggctatatgccagacacgtcaacaactgacacggtgacactcgacgtgtaaaaacaagtgtacagtttaccttaagaacatcttgcttgcacttttctattttgtcttgcaatttcttgagctgttcagggttgagggatgggtctgccttgctgttggcttctcgtgagatagccagcttctcctctttgcacgctgcatggtgggctttctttgctgcttctacctacagggagaatgagttcctgaatgccatgtcactgggagttcaggatcctcactagaagtcacacagaccatgggaatgcttgtgctaccaagaggggagaaaaaggcaggtacaaaatt

SEQ ID NO: 70293 - DNA, 1375 bp, Homo sapiens
agacaagcttcttgacagcacaaaaccccgaagtgctaaattccctcaacgcaaaaaccaaagaactctttctctgcattcagaatgatggcattcacacggggggaagacaggtctgtctgcacaacagaaggaaaggtgacctcattcatccaccttttcctgtctccgcgtgtgcgatgctcccgcgtgtggctgcagaaacggtaagtgtagagaggacgctcagagaccactcgggctcgggagtcatttagacttggccttgccatgcaggtgtcctgtgacctcagacaaaataaactctgggtgtcaacaggctcattggtgccgctggcccagtgcccaactaccagcaagtgctgtccctggcctgggcagcccatcacagaacagcagcaggccatcactgctggctgagcctgacctgcgacggtgcaccccaaattctgctttcttttcctccactgaaagtggaatttgatttttcccagtatcgggaatggctgagcacgcaggccgaagacaatgttgtagatgtcatacaccaaagggcatgaaagagctgaaaacaaaaatgacagattcgacggcctgcagcagccagccaaaataaactgcccggctggctccctgcagtgctcctggtgggtggatgggtaaaagggattggtgctggccagggctggtccctgccctgtttgccctaaaagcaggaagccgcctgtgggaaccaggccaattctgcagctgctggaacacagcaggagaggctcctgtgagaccttcagtcatatctacctgaccacccaccgccacccactccttcaagtatgtaagtccctcccatgtgctgtgcatggcaccaggccctggcaacaccagccaagcaacacctgccaagctaggggacagtggccatggacagggatggcagcagtgctgaaaactgtccaagggaaatggcagtcacttgtggaactgtcttgtgctgctgctggcctgtgagctccaagaggacaagggactgtccctgtcacactcacctctgtgtcccagccccaagctcaggccaggcatgagcctgactgactgaccaagggggacaaaggacagcttggttaaaacccatcacatcatgagaaaaacctccattactgggtagagattgggcagcaaaggctgctttctgctctaatctcaacgtcaaagtctgtccaatgttgacgtctgttttcataagcgtccaagcattgcttaggttgtgtattctaaactgtgaaaaccacccatttaaaaacacgtaattctgaagagtcacgagattcagggtcagccaaacatggccaagacaaaggcagcccacacgtcgagg

SEQ ID NO: 70294 - DNA, 734 bp, Homo sapiens
aacatagtaaataatgaattattgttgccactattattattgcatagtaattatgattactatcattacttctgtctctattttaaagtcaagacaattgatgttcagtaatttgcccacggttgtccaagtaatggctggtggagactagtatttgacaccagctctgcctgcttgctaaggtaatattctctccattacaccaagatgttttccaaaaacaatctcaaagttaagtaaatcaggcttcctacaacctaaaattggattgctaattaaaagggcttaatctggtggattgcagagctcctaaaggtaaacacactgctgtgcagcaacagagacaaagtccacaacagataacggtacttcaaagccaagtcctccaaagacattgccgctgtgaggagactgttgcaggactaagatgcatgcacgctcctaaccaggctctcatggagagaactccagtgaggggttctcccacactggttagggctctgctccataatcataggggcagcgtgtcatctgaaccactaggattcacagaggctggacaggccacctggcctgggccctgatgccacctctcacagtaatttttttttttaggtggaatctggctctgttgcccgggctggagtgcagtagtgcaatctcagctcactaaaacctctgcttcccaggttcaagcaactctagtgcctcagcctccccagtagctgggatta

SEQ ID NO: 70295 - DNA, 4757 bp, Homo sapiens
agatacagataattcaaatcactggtcacagacccatagctcttaagtgctaggctgagactcaacccagaccatcagactccacgctgcccaactccaacaagacaccacatgcccagctaccaggcatttccagaatccggcaatctctggcagcgaaaagaagaaagggcaggaggattctccagagtcccaccacctgccagggaggctggagcctcagggcttccacattgaccctgatctctaccacatccccaaaggcgctgggcctgtcaggaagtactactataatttttttttgacacacacatgtccttaaccataaaaatgaatctgcttgcagcaccctctcagctgaagaaacacataagctgaggagactgagaggcttctgagagcgattgtttcttcaaaacgaggtcaggtagggcatgtttcctggctctgcttcattcattcttccaggttgagccgactacaacgacctttaccatacctgtgcacacgtatgggacaagctgctctttaatgccaaacagtgctggagcctttggaaatcaatttattaatgcaaaaaatatgtaaaatgtgtatttaataattaattgggggcttctcatctggaaggtaaagttcctgggaagagagtgtgatattgagtcgaaaatgagtctcagctccacctctgtaattcagctatttgtcccctctgagagccactgtccttgtctgtaaggcagtacaacatgggctctcattacctcccagggtattaagaggctcggggcgacagctgtgaaagaattttgagaaagtgcaaagtgacagacaaatgagtcatccctggtctttccaaggacagggactcatctggcacttcttttgcacatttcagactgtctggcacccagtggttgactgattatttcttcctaaagaaactgaactcaggctgggcgtggtggctcacgcctgtaattccagcacttcgggaggctgaggcaggcagatcatgaggtcaggagtttaagaccagcctggccaacatggtgaaactgtgtctctactaaaaatacaaaaattagctgggtgtggtagcatgcgcctgtaatctcagctactcaggaggctgaggcaggagaatcacttgaacccgggaagtggaggttgtagtgagccgagattgcaccactgtactccagcctgggtgacagagcaagaacctgtctcaaaaaaaaaaaaaaaaaaaaaaaaagaaagaaagaaagaaaaagaaaaagaaactgagctcagccaggcacggtggttcacgcctggaaatctcaacactttgaaaggccaaagcaggtggatcacttgaggccaccctgggcaacacagtgagaccaccatctctaaaaaaaaaaaaaagaaaaattagccaggggtggtggtacacacctgtagtcccagctactcaagaagctgaggtgggaggatcacttgagcccaggagctggaggctgcagtgagctacgatcatactgctgcactccaggctgggtgacagagtgagacctggtctctaaaagaactttaaaaattaaaaataagaaagaatctaaaaaagaaaaaaagaaactgagctccaataccggaattcaatgctgaatgagttctgtgaactctgaacaagggctacacgtgagggagactgttcctgcacacactccagacctgaactcactctcacgggctaccctgggtgccatgcaagatgaatcagaagcatgccatccgaattccaacaagtgattttgaaataaacttttagaatggggtggtgtgtgctgagttattctggattctttcccatcacaatggcaaaaacatgtaagaaaatatgtttcccatgtagttcctctgaatttatttcttttccaaaataatgacattacagcatggctattttagtgtcactttttggaaagaaacaaattcaagggaggcaaacatacctccttctccttcctcccaaaggcctgctgaattaagaggtggaagctgtaacaacgcagaaacaaggccgcaccgcccatggtggaggacgtgctggaagagagcagccaggtgtgcaccaggagaagaaaaccacctaaaaacgccagtgctggagacaggccttggcagggtaggaacgccaagctcagggttgagaaatgcaaagttgtgagtggcaggggtgagggtcaattatcatgaattatcacactttttttttttttttttttttttttttgagacagggtctcggtctgccgcccaggctgaagtgcagtggtgtgatcacagctcactgcagcctcaacctcctcagctcaagtgatcctcccacctcggcctccccagtagctagaaccacaggcatgcgcccagctaatttttgtattttccagtagagacggggtttcgtcgtattgcccaagctggtcttgaactcttgggctcaagtgatccactgtgcctgctccagggtcatttttaaaaatgtatttgggccaggtgcagtggctcacgcctgtaatcccagcactttgggaggccgagaagggcagatcatgaggtcaggagatagagaccatcttggctaacacggtgaaaccctgtctctactaaaaatacaaaaagttagccaggcgtggtggcacacgcctgtagttctagctgctcgggaggctgagccaggagaatcatttgaacccaggaggtggaggctgcagtgagccgagattgtgtcactgtcgcccaccctgggcgacagtgtgagactccgtctcaaaaaagaaaaaagaaaaaaaaaaaaaaagctgcatttggagccaagccatcaagtacagatgactttcagggaaacccacctggggcattgcccagactcttacagagatgtggccactctcccatttaggggaagggccaagagggaaccagctcagcttcctatgccatcagccctaccctttcataaagttcaaactgaaatcaggggaaaacaaatacttgagggaacaagagagaaattctaatgaaatctgatgagaattcttggagagactcaagggttatgtacccataaaacacaaacaggctgctatgaaaagggagcaatcaggagccagaaaatagcttttctaacttttggaaacttcatttagaagcttttttttttttttagacagaatcttgctttgtcattgcccaggctggagtgcagtggcgcgatctcagctcactgcaacctccgtctcccgggttcaggcgattctcctgcctcagcctcccgagtagctgggattacaggcgctcaccaccatgccaggctaatttttgtatttttagtagagacggggtttcgccatgttggccaggctggtctcgaactcctgaactcaggtgatccacctgcctcagcctcccaaagtgctgggattacaggtgtgagccacccaacccttttgttctaaggggcacttctcaggaatctgggaatccgggaatgactgaggtattgaaaacagttccagatctcagattccagtgacttctgccagcaatgtatgtaagtacagtgagtcagagccattccttagatggtgtgcagagtctcagaggttaacagaggttgctaaggtgaccgtggcacaggctggaagctggcataacctccttcctcccctttgggcttgataacagatatcaggtaaacaaatgatgtattcacaaggacatccagctcccccttaacacccttaatttattccacaaccagacaaaagaacaggtcattttttaggccaaaaggctattttcataaagcaagaacattctgagtaaaaagaccatgttgctcatctctcctgaaagctggcctcgggagaaagcccccgataccccgctctaatcctctaactgcagaggtaggcagaggtggacatcctcgctgccacggcccgagcacacctggctggctgggttctggccgctccacaggccttgcactgagcacaggctgacctgcagctcgtttcctcttcactatctggggggagattcttcagtggttgggaaataacgatttattctaagccaatgtttgggcccaaggtgagagggccctttgataagggacatatttaccatgtgaacatctaccatgtgccaggcactcttctaagctgggggaggggcagtggacaaggcagactgggtccctgccctcctggggctgacatcctactagggcagattggcacacagcaaagtaaaaacagctatatggtgtgaaaagcaccaggacacagagaagtagggcactctaaaagacctgggggtggggcgggcttactgagatagaatgcgagctctctgaggactgcaggaagatgggcagtgggcatgagaaggacaggggaggggtctttccggcagaggcagagggagtgagtgttgtggctgtcccagcacccaacaaagcggaagctcacatgcttctgtggggcagggtgcactttagaaaggactaatctggcatcatagataagctgcatggtaactcagagttttgtacccatgctactggttttaaaaatgagaacatattcatttcataattggccgcagaactgtagctgtatgcactgttgcatgtcttctcaatgcatgatatatttaacaatccgacttcagtctattctcaacacggtgaccctctcaaa

SEQ ID NO: 70296 - DNA, 2535 bp, Homo sapiens
cacatcacataaattacttacaatgttggtaacacaaggtctcatctatgctacaagtcctgcccacatacagaggctaaaatttaaagggaaagtcaacagcaattaatatttgtatcttgcaaaaccagtaaaaagtgctctgactctgggtcccaggacttctcattgaagatgctgtcaatagcttctgagaactgaaacacagtgacagcactgggctcagtggattgtgaaatgttcagtgggagtggcgtgcctacgaatggcttgatcctgcttccaaagtacaggcaaaagaatgagtatctcagaactccaaaacgatcctgtctggtttctttccaggttcttttgttcaccttttagaatggatgtcatactaatcacacagctggggacatctttccaattgtgtgacgtctgctccagaatgatggtctacttcaactcggacaaggcaggagagtgacccgccacccggggctccaaacagagccctgccctttcaggtcttcgtacctcccttcacagtatccttctccctcaaacagcctcccagatgagtgtcaagatactaattattctttaagatcaagatcagatgccacctctttcataaagacttcctttattcccaaatgtcagctctgctgcctggcctgcctgcctgtgttcctctcacacagggctccttccaatcaacctcagatggagggcggtcatccaggcatctgtctctcccaagagacctaagatccttgagggcaggaaccacatggagtttatttttgtgtcccaatcctagcacaaagttcgccgtgttaaatatgaatgccatgcttttctcatcgcgaaccatgaggtgacttgggaacagagccatgcacaaaacgagacagaggaagtctaggtctctgacagtgtggtgtgcccaccagccatgccacctctggactctgcagatgagaggaataaacttctctttaagccactattattttgagggtctctgtgacatgcagcctaactcacacactttcctgctacctgtgctctctgccccaattccacagccacaacatgcagcagcaccaggacctctgggtttgggccctggacacactcagcacctttgtctcagctctcagaccttctctggaccctcctgtcctcgtgtctcacgcagagcctagcacagatgaggcacccactcaatcctgacccaagaagtacatggatacccacgttcacaccacataaacaagggaaaaagttattcaataaactaattttgaaaatgattgtcttttaaattaatcaaaatgtttctaaaatgcatttggaagtatgaaagtaggtcattttgaaataacaaaaggcacgctcataaaaagcaaaaatacctccatggttttggttatccaatttctcaatctggtttgggtcagtgggaaagtttaagaattaaaaaatgaaagtttttgacagttcaagttcaaaagtaaatttatagatgaagaaacagaggcataagagtgtttaaataacgtgcccaagtcacacaactagtaaggggcagagcttggattcaaacccagaccaggtgctccagagcctccctgagccaccaggctgtgctgcctcctgcatgagacacaggcaacaaaagacaccaaggaaaggcagaggtgagtcacgtgtgcgtgactctgaagagtgacaggctggatgctaagggaggcagcatgccaacccgagtccaacaagagtagaatgttgacaggaattctttcattcactcattcattcgctcagtgttcactgcatgcctattccagacgcctgcctgctcaaacagctcaaggtgttgagggaggcagacacctaactcacacctgccttgttcacagttgtatcccacggctgggcacagcacctggcttacacgaggcaatgatatgtgagaagcagcaatgaatgaatcccagccttgctgcaaaccagctgggtaaccaggggcacgttacttaaccttcctgaaccttagtttcctcatccagaaaacaaaactaacactgcctaccactccttgggattgttggaggactgaagtagctgctttccacccagggaagtgaggaaatggcttccaagccagcgacaccaaggtgaaccttggatgggaatggggcaggtgcagagtgggagaggcaggaggtgtccgagacagaagagaccttaggtgatgggaaggtagtggaggaacacagtcagcgtcaatggaaccagccagggttcagagggctccacaaagccgatggctgccctgaaacaggaacagcgaggaaggaaggaggaactggtatatttctacacagaaatccccatgtggtttaaacttgatgagtttctcataatgtgtaatcttccagctgctggctaggctgagaactatttcacacactattaatagttacattttttaatttaacagagccatgcagagatcacgttgttattattatggttaac

SEQ ID NO: 70297 - DNA, 2812 bp, Homo sapiens
cattccggtgtgtgctacccgtgcctggctggtgaagagcctttctcccactccacctggagctccacgagggaagggcttcaccctttttatctaacccaaagcaagtgctcaagtaacaagagaagacgacaagggaagggaagagaggaggtgctgtttgtgctggatcccgaggtggagaaggtaaaaatgctgtctgtgacaaatttgtattttttaaaaatcctatatgcagattcatatagtaacccttaaaataaccatgttttccccaacatctttataggtcaaaggaaacaagctgatgaccagccatcctggtggcattcagaccgcttgctccagctgacaaccacctgggctatcagaatcagcagcaaaggtaggacaggccccaaggtcacccgtcccagcgcagcccatcagctcttagctcacctatgcaacttaatgaagagctggagctaacagcgtgtaattagatgtgtccccaaaactcgtttatcttatgcaatgggaacacatcagctgacagatccagacttgccttggactgatttttacagcaatatttttttagcctctggttggcaagcaccctgggaatgtggagatggaggctgaacacttccccaacctaaatactcagttgatgttccagaggtttaaaacagaaaaacttactttaaaaaggacaaaaatgacactttttcaaatttgatattaacatgagaattcaaacagtagtgtaagaagatgtacaagagtctaaagatttgaaagaagaatgattggaagtgacgcagttagagcaggcctaactgaaccagaacgatgcaactccacagctcctcccctccccattccagtggagccaaccccacagagggaatgggaagcactcccacagggcaacgtttttaacagaaatatataacaacttttgctttcaaagttgggtgggactagaacacacaatggaaggatggagtcaggagacctggattcttgtgcccgctctggcttttacagtctgcctaactctatgcagtcacttcctgccagcctgtttccttacctacaagagggagagacactccctggccagcctagttctcagggtgaacgaaaggtcattatcactgcatcctctagtcatttgcttcttcgctaattaacacatcttgagcacctgcgatgttccaggaacaggagatggcagcgtgcaagataaagtccctgacttctagagactgcatgttagtggcaatcggcgtctacccggccttcaataaactactgaatgaaggaaaattctacctagcaccagacacaattactgggtttctaaaatggaattattcccccggccccctgcatccagcagcctgctgcagggaagctcctccgaaggctgtaggcaggagcgggacaatgcttgctatcagctccacagatgttacctagtactattcctacacagcgccttacagaacaaacagtaaaaccaagtggaaagcatgcacgggcttaaaaactcaaactccttaactactcagtaattaggatgtcattttacaccaaaaatagatttttctattttatacaatagaaggaaagaaatgtagtgcagagtgagtcattagatcgtgaccttatactgtcttcatctctgaatctcagacgctgtgcaaagcagggggtcagcatgtgtttgctgaatgagtaacactgttcctgtcaacaggaatacggattacaccaggtagctctcaaacttcctcctcaatccactcctccttttacattcatggaaagggagggggaaagaagcccagtctccaaggtcagccagttacaccagaagcagtgccaccagaatatgagccccgccctgggacagggcacagagccctcactagcatgctggagaggggccaccccaggtcctgggtttccctatacccagctgcttctcttcaagctggtgaagcccctgccaccgccaccacctcctcccctaccttgggactttgtgtttaatcccggaagtcacaatttaggaggctcaaaaagaataaaattctgggtatacaaatggaaaagacccaaatgtgtctgtcaagaatagccaaagggatgggattatttagccaggagaggctgtgggagggatgatgggtgaagtacttgagattcttgctatttttctaacagttttattaagataataattcacacagttcacccatctaaaatgtacacaatgatttttagtgtgttcacagagttgtgccacatcatgacaatcattttagaacattttcatcaccccaaaaagaaaccccacacccttccccagtcatcccccacctcctctactcccaatcctggcaatcactaatctactttctgtctctatggatttgcctatgctggacatttcagataaatgggatcataacatgtggctctggtgattggcttccttcactttttccagaatgtcttcaaggttcaaggttcgtccacgttgcagcatgtgtatttcactcctttttgttgctaagtaatattccactgtatgaatataccacaatttgtttgcccattaccaagtgactggacatttgggttgtttgccacttttccgctattaatagtgctgctattaccatttgtgtacaagcctttgtatggacagatgttttcatttcttttgagtagatacctaggagtagaactgctgggtcataatgagaaacttccaaagtcaggagtttccaacattcagccagagtgctttcca

SEQ ID NO: 70298 - DNA, 2495 bp, Homo sapiens
aggtcggacagacatactatataccttgggggtttctagaaacctttcctatgcaatcttaaaagtatttgaaacacacacttcacagtaggtaacatcctaacaagaaagcatgtttttctgtgaggcacaggctgcaccagcacagtattttctggaggacggagagaggatgctgcctttttaatggcaatcagtaatccagtaagtataattcactgagtgatgggtcacttaagtatcaggattttaaaaatctaattagaattacagcaccacagcaataaaggggagccactgtttttcaaaaattccagaatatgacttctaagaaacaattgaatacgtacataaggctgctcagttattaaaacaataagacttttacattttgttacccgacaaaaatataaacagtgtctagtgacagccctcagagggggacgagggcacagggtccagctgggatgagaaatgagaagaactgagggggaggatgggaaggtggtcgggaggggtcctggagcggtggcaggtgatcagagactctgcagtaaacagtcatgaaacagcaattacagtctcctggaaaagataatttgctttctctctcaagtcccacttatgtgtttgtagattagatttggctgtaaagaaagaaaatggcagcatgtaataaacattaacgccttaaagtagggggaaaagccctctattaacagctaactcaagtaactcatttagctactcggtaagaaaaaaatacagctaaagtatgtcagctactctaaaacatgccaaagcaaaggtgcaaagttattgcatctattttgaaaggaaacacgcacgtatgttctaaaaccagagtcaaaaattacaaaacacaatccttcatttgtttaagccgaaatctattctccaagaaaatcaaacacttactctgacatcttctccaagcaccctggataaagcattctgcattgctcagttaataatgaactaattgaacattgccgtcacggagctctaaaactaggtgcgcttgcatagaaggtgagagttctgttaaatcagtcactcagtgagaaagaaaacaattccgtgaaaattctactttcaaagaggtctaccttaaaggaaatgcaagccttccacagcacactcacatttttctgtcagatgccggctaactctgcagctcagcttccgtacctgcctctttccaaccctgctggcatgtctgacctctgtctctcagctgaattctcccagcacatttcatcatttcctgttggctgccgagataaggtcattcccatacactgctgcattcgctgtacagtcccaggttcccagactgcacgctcctgcctgctgtggccatcacagaagagctctcttttcagaaagtggccaaagagaaatttcagtatttccacggaaaatcagggagaagaggtctgagaacaaaattcatactaccccctccccaacacacaaaaaatcaaattatatacaaactaacttacaccatacatgagtcttctaatatcttcttgtatttgggatcctcctgcttacaagagaaaaaagacagcatgctctctctgcatctgaggggcgtcacagcagtcagtgggacagggacttgcttgcacaggataatcttacactgtccctacatgtggaagtcaacttccttctgtgactacacacaacaaggcaatgcctgtcagcagatgaacaggaagcctcatgcaggagacaggactggggacacagagtcccctggagacaggcaggtgaccccatggtctctcagcagcacgactgtctcctaagaactaggacactcaaatacgcaactgtgattacatggaaataaaaacacctcgcttcttcaatttttacaaagaatttaaagtgaagaaaaaaacaataaagctttaggtgaggagagaaagattttaaaatgcttgtgcctacaagaatacatgctgtacgattccctttggatccagcacaagaaaaggcgtaactaatctacacccttcgaagccgggacagggaagagaaagaggaggcaggcaggaaggggtgccaggagggttttggagctgtgctgtggctcttaaactggctatgggtgtgctgggcttgtgaaaattcactgatatgtacacttgagatctgtgcactttaggtatgcatattattcaataacactttttaaaatctcatacagtaacaaaaaatacagacactacaggaaagagtagatatggaaaccaacctgcaaaaacagacaggaaacaaatatttcaagggatcaatttctgctaggtgccctcctagaagatacacatgcacactcccccattccccttggcaagccaggatctaagtggtaatggccagggcagggccagttcagggcggttcctcctttcaacatggcccaagcgggtgtatgtagggatgggaaaatacgtaat

SEQ ID NO: 70299 - DNA, 567 bp, Homo sapiens
aaaaaaaagaaaagaaactagaatgaccccccgtttcaacaagtatcaacacatggccaatcctgtttcacctgtgatgtgaaaactgtagaatgctcacaaaatcacagaacccaaatgcatctccacctgacctggcatgcccccttcgacactggcaccacagcccaagtcctcacgctgggaagaggcacaaagcaagcagagcagggtcctggcctgaagggatcagcaatcttttggggaaccagtgccacctgaatcacatttaaaaaggagaacgactaaagtaaacccgcaaggttaacatcacggtggtgagtcatggcagtatcaggtgcctcctgagatgatgtaatgaaaagggcacttcacctctgtgggactctccccaaattcatccaccaatctaatactaggaaaaatcatcaaggacctggatgggatcctagaactgcaagaaaacatcagtgggaaaactggtgaaatccaaagaaagtccatagtttattcagtaatactgcatcaatgttaatttcttaatttcaaaaaataagctatggttac

SEQ ID NO: 70300 - DNA, 2925 bp, Homo sapiens
accctcagagggtggacttctcactatcttctttgcaatgatggcttaacagtgtattcatatgccaaaacttatcgcctgttcattataactcaataaaactgtttcaaatttgaaggcagaataacataagactgcttacttcttattttgccaagtaagaatatcctttagaaactaccagctcttttcatcaacatggaaagataggacattttaaaatgtaaaagatacaatggtcaaaattttatacagaaagagcccttcccaagaaagggcagctgctaaccttacacacatgaaaactgcattgcccttattttttccacgttgatgataacacgattgcagactgtcatcttctgagactggcaggaatgcccctgaaggccgaccagagccgaaggacactctccgggttcatctccacatccgacctggcagttcctcctggaagggcggcaccagggacagccatgtgcgctgtgggacccagacatcacttccctgccctcccacaagtcaagaaatcacaagaagaatgtggcccaaaaggttcctgaagcactcctatgcagctgaagaagggaagtgccttgtttccacaagagctgctcacccccaagccacagtatctgtggtttgctgctgggacaagttccataagtcaacattaaaaactcttcagtgggattcctccaggctaaagtccagtgagctaaagccgaaatcaaatatgagctctcaagaagaccacgatgtagactggaatccttctgatattgcgccagaatgctaacaaaagccaagagatgtcatcagcaaagccctagagggaaactttgggtaaaatgacagtgcagtgcgctcctgctcaagtgtggctggtttggtggtaagaagggctgagcagggggacaggcctgctcttaaccccacctccccatgcaactggggctccaggcatggtcccaagccccatgtgtcagatagggagggacaaccccaaacacacccagaaaataagcatgaactttaccattcaagaaaccaggcacacacatgaatccagagccgtgtcctgcgccacaaagaccctcgggcgtgcttatggggacaccccagcctgcacacccaagctctgtccacacataccctgcccatggccaccattcagccacctttggctggaggcacgtgcacacagtgcacagcctaccctcagcaggacacgccagggaggcggcccatgcaggccatgtaaggggtctgggggttactggggcagggaattccagggtctctgtccctgtgcatggcctaaagggagaggcacaagttttagggagataccacttcttgatacctcagattcctcaccctatagggacagtcacactggaaaaagggccccgggcaggggtcccacatgccccacctacgggaatgctgacatatgaaaggtctgggggctgcggggagcaccctagcatatccacacctagagccacagcctcgcagccagcgaatgcagctgcctcttccctggcccagagatccttctctcttgtcagcaatccccatcccaccccaagccccagtctctgtctcactggactttacaccaggactcccgcaactgtgccttgcccgtttagactggaaattccatttaggctgcctcctggactccctctcaggaccctgcttccaacaatcacatagtcaaaggggacaatgtcccccctccccgcctcggggctgctccgggccccaactgccaggaagcaagactggacactgcaacgtttaactcacattgagctgaagcagccgagttcttcctctataaagtgagctgactgcagagaaactgcaccctggcattcagtcatgtttcacaataactccagaggaggagctctgcttctgacatgaagtgtggcaagccttagaaggaagcagagctacaaagttattcaatgcaaatatttaaagaacaggctgcttttggtgccaggaggacggcagcttgcaaacctccagtcacaataaaggttctgcttggttgggactgagtcaggatgacaaatgttgtttcattgcaccctccgtccactgaggagacaaggtttttaaagcaacttttcaggaagttactctgtccattgggcaggaccttaaaagtcacagcaagagagcaagtgtctggtgtggaaaaaccagagtgtgtatacaactactcagtcaagaactaaatgtgcatttccaatgtcattcacgcggcaattatttggaaataaggatgggatcatgcaattttgccaacagtaaatatacagatttggtaacttcaagtgcctataatgtccaccagacagaggccttaaagcacattccacccatgttttcctccttgagaaaggcaatttgattgttaaaagaaacagtggccaggcacagtgacccacacctgtaatcccagcgctctgggaagccgggacaggaggatcacttgaagccaggagttcaagaccagcctgggcaacacagtgagacctgcccccttccccagtctccagaaaaatttaaaaattagccaggtattggctgggcgtggtggctcacgtctgtaatcccagcactttgggaggccgaagtgggcggatcacaaggtcaggagatcaagaccatcctggctaacacggtgaaacctcatttctactaaaaatacaaaaaattagctgggcgtggtggtgggcgcctgtagtcccagctacttgggaggctgaggtaggagaatggcttgaacctgggaagcggagcttgcaatgagccgagattgcaccactgcactccaggctgggcgacagagcgagactccgtctcaaaaaaaaaataataaaattagccaggtatgacact

SEQ ID NO: 70301 - DNA, 1811 bp, Homo sapiens
ccgtctctactaaaaatacaaaaaattagctgggcgtggtggcgggcacctgtagtcccagctacttgggaggctgaggcaggagaatggtgtgaacccaggaggcggagcttgcagtgagccgagatcgcgccactgcactccagcctgggcgacagagcaagactctgtctcaaaataaaacaaaacaaaacaaatatctgctctaatatacctgagcaaatgctcttatgtgatatcacaacgttgacaaaatgtgaagacctttcgcaattttacaaagtgcagtcctctacagaaacacaatttcttctcccttgtctacctgctctttaacagcataagatgccttttaaaatgcatctgccgaagatgaggcactcctaagccagggcctctggaatcttcctcctgtcccacgtgggatgcatcatggggtgggtgtaccagcgagtcacccacggccttgaccgcaccccagcagctctcccttttgtgcccttatctccctgctgtgtaaatggttgtaaactttcagattattgaaaccaagttagttacagacatagatgccgtcttaagcaaaggacacacataatctccctcatgtctatgtttctcagaggtgggggagaaagattaattatcttttaaagatgttcacatctgagagtgattcacaacttacttattccagccagccagaggaggtgaaatgagtgtgggcttcggtaggcagagcaccagctctgatggtgaccctctgaaggccactgaatctctctgagcttaggtttactgatggatcaagtggagagaacactatctggttgcaagaattaaatgggcaggaatgtaaagcttcttgaatggtccctcagaaacttcagaacatgggggcctgtgcagacagcccctcaccactgactctgcaccccccacgcacatcctccttggtggcacatgcccagtctccttatctgatgacacatttgcaggagcaaaggtcgcaattgcttaattaaagcatcaccacgtgcgagctaagtggcgagcaggcagccagctccagccaatcagacagctacagaacccactaatagcgggcttggacgtctgtacagggagcactgcctgctctgtggttcctctgaagaccacaattcatgatcttggcacgctcggttggcgacaacataatttaatataatgaaagacaaatgcagtttaaaacatgaaaatgctcacaaactacggtttgggtatcactttacattaagaagatttcatttcattcaataggaaacttcagaatacacagttgatcctatctaaagaccaccctgcaggtccaggcagaggccccgtcacaggcctccctgggcgctctgggcttgggctcagaggcccatatggggtcctggcaggtggcctcaggcaaaaccactcacccctttagctctgactctctttctcctctaaacaatgaaaagggaaacaaatcaacaaggctgtcctgaaaacaaaatgagggctatggaaagcttcttggtaaaatgcaaatgcctagacaaccaagctctttttatttatacttattttaattacaaagttattacttaaacattaatctaaaagtaaaagggcaatggtactgtgtggaaaacaaggagaaacttcctataattctaaagccttaactatcactgctgcgtgttatcttaatacaatttcacacaggtgagcagtgctcacacctttatcatttgctttctaagtcctatttcccatcacctagggataagctatca

SEQ ID NO: 70302 - DNA, 1833 bp, Homo sapiens
agccaagagtggcatccccaggtcctgttatacgtcaaaggctgcagccgtgtgggccccaaagcaatagcacagcttgctcccctgaccaaccaactccttctgaaaagaaaatcgaccttctctgatggagccgaaacccaatgaatcaatgaaattcaacagcagcagcaatcactacctctccaattgcggacctctcaggatgcctggccaggcttgaaagccctagaggagtaaggagttcggatttctgattcagtgagtctggggaaactctgaggagggtcacaagggcaaacctccccggcctctcctgcttggccccagccctaggacgtgctgcggtaagggctttgctccccccgccctacacacacacacacacacacacacacacacagacacacacacaccacccccccccccccgggacacggagggtgggaaggaaggaaatggaggccgctcatcaaagcgcccgaaatcagcgcacccgcgtgtgtcctgcgtcgccccccaggccaccccaggactaagccctgccctctcaccggcgcgtcccagccacgccttccctccagcgttgctccggcaccctcgcctaacctctgcacgtctcggattcccagctttctcctaaatcgcgtccctccaaaagtcgccccagctcccccttctgcagctgtctacacctcccccactcattagcagctcttaacccccgacggccctgctcctgcacttccctctccagcaggccccggaccccggaaaactgccccgctcccacagcgccgcccccatgggcccccgccccttccccgagccgaccccactcgccctcgtcctccccaagatgtcttctccaggcgccccccggggccccgagcactcgccccctcccacagagacaggaagttccgcgcggcccgacccgcttccctcagggcgcggagctcggcgcggcggccctgacggggcgcgggcccggccgcggaccagcgcccccgcgtcccgcccgcggcgccccaaccgtcgcggcgacccctgacctcggcggccactcacctcccaatccgtcgcacactccgttcaggctgccacggcgtctccagacccagctccggccgggctcccgctaccgcttttgctccggcagcactgcccagccctgcccagacccctgcggccgcttctgccgccagccgcgaccgcaccgcccccgccgctcccgctgggctctgtccattggctaccggacaccgagccccgccccacagcctccccggcgcccccgattgggccagatgagtagagaggcggctcaccccgcgtgaggacgagggaaagccccaggacgcgcattggtgacttctcctgtcaatcaaacggggagtgcctatttaatgggctgcgagggtggcgcagattactctcccaaagccgctcgctggtggtggtccttgagacgcgcttcccggggctggagttttgcggtttcgtcggcatccaggggtaagagggcgcggcagggcagcaccgcacctgaccggaagttcagggaaggtaatcctacagtctttcagaaagtttcctctcccaagggactcaaagaagctaatgtcgttaggagctcctccgacttgcgccaaaagcgtcattccacgtggacccgcttagtttaaacggggggttgggggggcgtatgttgctgctctctctaataaaatatatttggatggcaaggcaccaggcaatgcacacgcattctttccaattctcacaatcaccttgcatgatagggtattagccccgttctgcagagggaaa

SEQ ID NO: 70303 - DNA, 380 bp, Homo sapiens
gacacagcaagactctgtcagaaaagaaaaggaaggaaaaacaaaagagaagagaagagaagaaaaggaaacagactcaagggagtccgggtgccctgattcaaagccgggatgatactactctaaagtgccgcctctctccacacagcccatcacttccctctgtgaacctggcctttggcaggatgatgacaacacccaggtcacagggtcaatgagcaataaacagaaccgctctctgcaagctacaaggtgctgtataaaggactgctgttaggtgatccgatatggtgcacgtggaacctcagcagtcacaccaagatgacaataaaagcacaggagccgcaccccagagcgtgagcccatcccacacccctcac

SEQ ID NO: 70304 - DNA, 2272 bp, Homo sapiens
atggtgaaacccaacctctactaaaaatacaaatgttacccaggtatggggccgggggtggggggatgggcgctggtagtcccagctactcaggaggctgaggcaggaaaatcacttgaacccgggacgtggaggttgcagtgagccctgagattgcaccactgcactccagcctgggtaacagagtaagactccgtttcacaaaaaaagagaaagagaaaagaaagaaagaaaaaagaaagaaaaccagaacctatggaagagcctgaggaggccatgcagttcctggtcccggcttcaaagaatcactgaggcatgaagaagggatcttccttggactgacaaggaccctggaggcagcaggatttgcctggggtttcaggggccaaggtccagtaggacctgacccttgcactctgccaactgctcccagctatgtccagcacacggcagcatacccagatgtccaggcacacccggccatcccagcggcaggaaggacctgcactttttttttttttttttgagacagagtctctgtcacccaggctggagtgcagtggcatgatcttggctcactgcaacctccacctcccgggttcaagtgattttcctgcctcagcctcctgagtagctgggagtgcaggcgtgcaccagcatgcccggctttttttttttttttgagacggagtctcgctgtgtcgcccaggctggagtacagtggcatgatctctgctcaccacaagctccacctccctggtttacgccattctcctgcctcagcctcctgagtagctgggactacaggcgcctgccaccacacctggctaattttttgtattttcagtagagacagggtttcatcatgttagccaggatggtctcgatctcctgacctcgtgatctgcctgcctcggcctcccaaaaagtgctgggattacaggcgtgagccaccacacccggccaggactggcactttcattcttcccctggtacagatgaggaacgtgaaggcccaggagcagctgacctcagtagtttctaccctgagcctggaagagaatggtcaggcctgacctgggctgttgctttctgctggggaatcctgtctctgatgtggcacctcccacaggccagggaccagctccatgttccacaggattcttttctgctcaggattttttttttcagcctcaggatttttagtcattaaggattttagaactggaggcacctgtccattaatggacaaggttggaggacatgaagcctggggcagtattttcctgaggtttcccagggtaacagaaggtaggaccacagcccccaaccctgattgccagcccacacctgtacccctcccacccgcatcccctccaagtagggagtgtaggcccagggcattggcaggtcaggtgggtggggccagggcccagggccggcctcagctcagggcccctaggagtcccacttccctgggagttcccccggtgtagtcactgggatggaatgcacacaggtccctggtagaggcccagaccagcaagctgggagggtggggagtgtcttagtctttgtgtgggagtgaatgcgggtggggtgtaggatcaaggatgtggtttagtggggggcctactaggggcttcttagtccccccatttggagaggggtggtgccagcagggctggtttcaggattgggaccaggacacaggtcttagagccccctcacctcccacaaaggaaggtaagctgcaacccctgtgggaagggggctcaagggggctcagccatccgggggactcagcaccaccagacctgtccattccccttggtcagcctcagccatccgggggctcagcacccccagacctgcctgttccccttgtccaccatttccaccaaagcccacaggtgggcctgccccaggattctttttgaaatagcttgcacctctggggccacccacggatgggacctcatgggtatctctgaatccaagtgggagccggaggagggatacagggaggcccactcactgcctgccccaaatctgacaccatctcttatcctctgggccactcccagctgcacacaatccgttggctgggtgggtccaggtgcatgtggcctccacggcacagccacacccgactcctgtgtgtgctccctgcagtgacgcattggccctgcggctggcctgcatcggggacgagatggacgtgagcctcagggccccgcgcctggcccagctctccgaggtggccatgcac

SEQ ID NO: 70305 - DNA, 1221 bp, Homo sapiens
ggagatcaagaccatcctgactaacacgatgaaaccccgtctctactaaaaatacaaaaaattagccgggcatggtggcgggcgcctgtagtcccagctacttgggaggctgaggcaggagaatggcgtgaactcgggaggcggagccgagatcgcgccactgcactctagcctgggcgacagagcgagactccgtctcaaaaaaaaaaacaaaaacaaacaaaaaaaaaaactcgatcgaatgagtaagacgtgggagcccccggaatggcaggcggaagcctctggcagggccaagagctcaggcagagctcaccttccccctcctgtcacggggcctcgggcctcaccgagggctgcaggtgatgtagtttctcgacagcggccagcgatgccacgaagatcgcgggctgacagtgcacggtgcggtccagggtctcctgcggcccgtgcaggctcagttccagcaggtcgtagcccagcacgcggcgggcggcggcgtagagttcgcggacgcgcgggtagttgagcagaccgcggcccatgcccaccacctggctgccctggcccgggaagagcagcacggagcactggcccggcattcgccgctccgtcgccgcccagggcgcctcctcctccgccccggtcgcatctcgcagcagctccgctacaccctgggcgcccggcggaggcaccgggaagctcgaggcgccgcggcggtagctggcgcccaagcccctgacccacgctacccgtgcgacccggacgctcatggtcggacacctgcccgcgcgcgttaccgtggcgaccgaggcccgactgcggcggcgcggcgcagcgtggtccctgacgcatttcctgccggggcttccggggcaccgggagcgggaagaaaggttccgcagacgctggttccgccccggctctgaggcccttcgggctgcgttctggggtcctggagggactcatgcgtttacttaaacagccatagccgttgaacggaacacgatgccacaccacagtgggtcctcaacagatatttatggaataaataacgcaacgcaatgtagtatttacgctttctacctggcacatgaagagcacttgaaactcttccacattgatggtttttgttgttgtcgttgttgttgtttgttgttgttttttgagacggagtcttgctctgtcgcccaggctggagtgcagtggcgtgttctttgc

SEQ ID NO: 70306 - DNA, 1401 bp, Homo sapiens
cattttatagatgggaaaagtgaggctagaagagacgacaaacgacacgccgttggacacacggcaacgttttagatgttgggtctggccgggcggccgtcaccggtcaccatggggaggaggaggagccgagagacttgctcgcggccggggggaggcagaagcgcgtcccgcgggagaggtggctttgaggagtgagctcccggtcccgcggggacgcgagtgggcccagtgcccgggctgccaggcggggcggggcggggccgggcgactgagaggggcggggcctggcggctgggaggggcggggcggatgcggggacagcggcctggctaactcctgccaggcagtgcccttcccggagcgtgccctcgccgctggtgagtgaggacgggacgcggagggggcagcgggaagtgggggcccgcatggctgcgactcttggcagcgccgcgggacagagggaaactgaggccggagccgcagactggacacccgagggggcgacccggggcagcacttggggctcggctaccgggtcagggggcggcgggcagcagagtctgggcctccgcggccggggttccagcgcgggccgcctccggctgggggttcgggagggaaaacttggacaaccctgccacgcccagcccttggccgcgtggcttctcctgcaggaagcgcggtcccaggagtggccgacgctccctctcctgcccattccgcggatgggcaatcccaggcggaactcccttgagggtctcagaatatctgggagacctcgggctcttgatctccgagacaccccgtttcgtagtggagaacagtccagatcggggaagtttattttgcccaaagccggttagaggccccctggccctcgattcccagtgcggggctcaggtgcgttgcagcctagacgggtcttactgtgagccgagcagcctctgggacctgtctgcttcccctaccccttgcaaagaagccggagcccaggtaggagaagcgggggcttcctgctgtgaacgcgctgctggccagggcagctgccagaggccatggcctggcgtgggcctggagcccctctggccagcctgccaggggccagggctacgggataccagcagcgtgccctgggctggatggcaggagagacaggacttgaggctgtcccagaatgggctcaggcagggcgaggatatcaggggaggtggtgtacaggaagcagccgcccagcttgcctggcacacagcaagccctgcccatgaaggcctactgccagaacagtgggcgaggcccggcgtctctgtggagtcggtggggcccgggacagggcagcctgaggcaggtttccactggcggtgaaaggggccgtgtggcaaggacaggagagccagcctc

SEQ ID NO: 70307 - DNA, 1579 bp, Homo sapiens
cactgtgctccttccacgcagcccatgggaacctttttgtcctcatgaacaaaccaaggtcccttccacccagcacaggcctgggaccagagtggtcctcggaaagcatatggcagaagtgaggggcagaggaaactctctgttacactgtagcataaggaggtgccactcactgcacgtttccagcaggaaggttcctagtccaatcaggattacacagagaaaaactggctcagagaccgtagagtctggccagcagccaggctcagggactcctagttcccggcccgggtccctgttcttggctctggggtttccacttcatcacctgcgccactaggctcatctccgtccgggagacagcacctggaggagatgtcgggtcccagctaaagaaaacacccccccccccgccagcccgggaaggtgctgtggcctcagcctctgggcacgcaataaaaatccagggctcatccccagccaggacagtggggaacgctttggagtggaggaggcaggtgagccggatgggccgtcctcacaaaaagggagagaacctagaggcttctcaatcttttccatttttctttagatttctcctccacctctcacagcctgttttctttaacctgcaagatgaggggaccccgaggctcaaatcaaatgaaaaaacaccgaattctgtgaacccaacagttacagctacacaaattcacggggttcccgttgtccctgtgaggcagcggctgaaagaatccctctgaagggactctcggagccgcagtgttctcatctgtgaagtgggggtgatgagtttcactcctcgcagggctgtgtcaggctcgggtgtgtggaggacctaaagttcccaacgcagccctcagccggtctcgggcccgggcagatcagggccgcaggtaccccggtctcctgctgtcactcttcggcccccaactccacgccgctccagagctgcccaggacgcgctctgggtggctcaccgcggctcccgccgcccgggagcgctcttccctgtcccgcgccgcgggctcccgccgcgctcccaccccggccgccgcacgtgcccgccgcccttccccgcacctcgtgctccagcttgtgcaggaggcggccccagtaacgttcggggacccccgaagcgcgcagcgccgggccgtgcagcgccgcgaactcggccaaggcctgcgcgccctcctccggcgtctggcccgggctgctacgctccgcaggccggcgctcgggaccccgctcggcctccatggcgccagcacccgcgccgactccagcgccgccaccgccgccgccgcccgccgtccgtcggccctgccctcccgcctccgccccctgccccgccccgccctcctcccagcgcccccccccccgccccgccctcctcccagcccccccccgccccgccctcctcccagcccccccccgccccgccctcctcccagccccccccgcctccgccccccgccccgcccgcctcccagcacccccgccccgtcctcctcccagccccccgcccaccgccccgtcctccccccagccccccgcc

SEQ ID NO: 70308 - DNA, 946 bp, Homo sapiens
ccctcttctcgccccctcaccccgtcccgccccgcccccagtccgcctccagcccggtttgccgcggcccccgggcaggccctgcgcatcggcggggtgcgtgcgagagcgcgcgagcttgccaggagggggcgcgcgtctgcgaccgcgcctgtggtttggctgccgccgtgtgcgcacgcgcacctgatggtggctgagcttttctcgctcagcgcgcggcgaccccggggaatgccgggagggcggggtgcctacgtatagggcgctgtcaggaccggaaaaggccccaccgacggcccggaaggtgtcctggggcccgaacccggtgaggcggcgcttctgtgcctgcaccgggcacacagagctcgcaggccccctgccttgggagctctcgattcttgtgagcgtttcaccagatttggatgctgcaaaatcgtggcccttctcaattacttatatttggattcggaatgtcagttgatccaattaagaccaagtgtacccgtcagaggaatttactcctacatgtcgggatgtttcgaagtgcagttgagctgggcgtggtggccgcgtctgtagtcccagttactcgggaggctgaggcgggaggatagcttgagcccaagaattcaagtccagcctcggcaacatagccagactccctctttaaaagaaaacagttcagttatagaatttcaaaagacattctcttttgaactctcattgagttttattgctccatagggatacatttcaatgtcttcctttttgcaattttgtaagaattgtaatttgctaaaaaacaaaggctgaaaattttttggagcttcagatgctattttgataacatttttgaactgagtttgaataaaatgcaccaattcacggacttgttcaattccattgtaggaagcaggtgggtctgcaaaggcaaaaatttcca

SEQ ID NO: 70309 - DNA, 620 bp, Homo sapiens
ttccagcatctgcagagcccgtcctgggcatggttgctgagccaggtacctgaagggccctgtccagtgtcactggcaccgctctgtacagaaggtaagtctgcccccactttaaagatggcactgagccccgtagaggcaacttgttcctggcactgctactctgacctcaggccggcccatgtcgctctcactttttcttcttcaaaccaaacaggctggactccatacctgcccaaagtcctaaagcagtgttcccaggcaacatcccccagtgatgacaaaaccaggctattagaggtcaatttctggtcaagaatattagaggagtgcagggctggatgcccacatggctctctgggagcctcggggagggacatggcatgtactttctggtatcatctcgtgtgaccttcaaaacaacccagacagcaggctcccattttacagatgaggtcacagcaccacacgcaggagccggctctcagccagcaccatccgaacccaaagacgggcctgctgcagcacatcacgctggccctgcagccaccaagaaagagatatgaagcccagctgtgctggtccagggcggaggcttaggaatctctatcattccttcc

SEQ ID NO: 70310 - DNA, 3958 bp, Homo sapiens
cggtaggtggggggttctcccagattgttctggagatgctgggaagaggggcaggtgaccctgagggaaatgcaggctcccgctgaggaagggaagatacacgtctgctttctctcactgccagccaccggcagcccagcccttccctgcttccttcagctacagtcactttcccatcctcccaactcctcacttgccaacggcaagcagcagtcctgcatccttattcttgaggcccagaacccccttcctcttggagggaccgattagcaagataaccacctcccaacaccaaacgggcacggtacccagcagggagcccttgagacgagggcttaggcgcatcttccaggcccccctcgtccccgacatttggacaaaacctcccaactctcccaaccctgcctccacctgcccacgtgacccccacctgcccggggtttgcagccctgggttgtccaagcccgctgtgacctttgttctccagccactcctcttgcttgacattgacattttggctttcagaaaacgtggagcctttgaactctctcctttgagatcctccccagaccctgccaagatcagggtgtgcacctgaccgaggaaccaaaccctggggccagggtcttcaatttgttgggaatcctcctgcctgtgcctctccagccagggctgggaacataccaatgacaccaaccctggggctggaggccaccgtctggtttctcaggctccctgaggtggtcctgtgggcagttctagccagtcccttggtgctgaaatgtgggcatctatggacatgtctagtctctgccttctctatgtctgctgccagtcctgccttggcactgccacgagcctgagtgacagcagctgtgcctggctgttggtcttccagaccctactgtgaccccactgtggccagtgtcagttcaaaatgaaaacctgggtgtgagcctcccctgcccagtgctgactgggacctggccaagcttgtagggtagccctgggccttgcgccatctggcccgcctcctttgcgtccttcccagtcccaggtccttgaacccacaggcctctggcaacagtcacagtgctgaaaatgcttcccctgcccccatcattgcctgataaatgcctcttcccctcagccctccccggcctcccccagcctcctgccatactgaacttctctatcccacaccaagcagcctgtgatactcaattatctcagtgattttaaaaatgaaaacctgtcttctgcactcagtagaggacccctacaggcaggaaccgtctcttttattcatcctgtctcactggaacccgcatacaataggagcccagaaaacacacctgttccgtgagcgagcgagtgagatgatctctgaccttggccagtgggagccagggccctaagggctctgagtgcagccacaggcccagggctgggcgtccatggaggaggtctggccaaagggctgagtggggcagcctggtgaaagggccccgaccgcttgaagagcaaaggaaatgtggtggggtggggggggttggggggttgtcttggggctgtggacatcactcctgagcgccaccctaccctcagagccagaaccagagtgggaggaaacgagtgtcccttgggctaccgagggatggttagggggcagcagtgggagccccaatcccagtagccccctcttgggccacatgcctgccctgcaccaggcccctttctggcccagacagggtggctcctggcctccagaccccattccaacagccccagccttgcccaaggaattaagctctgcctgcccctctggccctccgaaggcaaatgctggcaggctgtgccatcgccgggctgtgaagatgcccagatctgcacagaccttgggcttcctcggccagtcactcctggcactgagtcatgtggcgaggactcagatgccacccacctgcccacttgcctgccaggaacgcaccaaggctattaacaggctgagcggtggccacagaagggctttattttcaaataaacaggcggaagcactgttatttctgtcaataatcactcggttcttcccagcaagttggcaaggaagaagtcatacactgtacaaaaatacatttatttttacaggcttaaaaaaagtccacctcaagctattttaagtcaccctaacctccactttcaatattttccccgatgggactttggaagttccagttcctctcccctccacgccctgctctctaggctctcccttcctggcagagtgtgggggtactgcccagcgctggggtgggggcgtttggagggtggtctggagtgatgctgggggcactgagcactgcccctcacccttctgcacagagggctccggcactcaggcctaacaccctgccccagggcccacagcttcttggggctccgtctgtcctttgggggtagctggacctcctcatctgcagggctgtctcgagagcccacccagctctcctctcccagctccctgggcttcctgtttcctgagggtcccctcaacccaggaggtactcagtaagtctttgtggggtgactcaggggacaagtgggaggatacacctctgccttccctcactgccagccaccagcaggccagccctgtccctccttccttcaaccagtcactctcaggtcttcctgactcctcattttctgatggcaagcagaagtcctgagtccttatcttttcagatgggatccccctagcctcgcccccctagtagtgacacactgtccttatttttcctggcatgagtagacctgtgtgtcccagatggcccaacaccagactgtccccatcagctctgcaagacccactgcaaccaaaggtcaaggggttcggaaacgcgctacattctacgcgccttgggaagccacactatcactgagggcccaggaagtcccacagtagagacgctggcttaactgtttaacccagcgtgcagccaaattctctgacatcagtgcctttttggcccaggaacctgctgatgtgccgtgggacctgtgttctctcgaactctgctggggaccctgctgctggccagccctccctcttcctggcctctccaacagcaaagcaaatgattgccacgtgtcctttcccacagctacacgtggcccccgttcagcccagccctgggcccggctatgcaagcacacggaggctcttggccaggccagtacaggcaggggcacccacacagctccacatgctgacctttgcatgtcttcccgtccggctgcagtgtgaatccaacggggcagctgcatcgcacgccagtggctgtgtccttgcatgtccggtcgcagcctccgttattgactgcgcacgtctctggggagggaaagagacagagacctcagtttccttggacagaagccactggctttccccttccgtggaaagatcttctatgagacaggagacgagacccgggttcaagctctggctctgatatactctctggctgtgggactctagggaagctgtgctgcctctctgagcctcaagctccccatctgtgaaatgggggaatgacaccattcctgtggggttgcatgtggtgagggatgagtacaccgcaaactgcagagggctgtgcttatacagaggctgctgccaatagggtcaaaactgctatctggggccagactggcctggctgtatttaactgcccgaggctggattcctaaaactttgacctgcctggactcagactccaagtccaggctagaggttacttggaggtgactggggcccccaaatgcacctcagtacagactggcttgtggccccggccagggagccgaggggtaggttctgagggctcacacaccatccatcaccttgatgaggctttcagcccaacatctgttctcactgagtgatatgccaaaggca

SEQ ID NO: 70311 - DNA, 2091 bp, Homo sapiens
tgcgtgtgtgcagcagccatctacatggatatcccttagggagaaagcaagggcacggtgcctgggtctagattcaggctttgctctgtgagttgcactgtaaatggcacctcgtgacccacggagaccaagctcttgctctaggtcagattgtggggcatggtctgtagaactacttttgtgtcagggtgatttgctcccctctcccgagccacccatggttctagggtaccccccacccgcccagcagactggatctcccctctctgtctgcctggagtggctcatacccccttccgttgacctcagttgatgtttatcttcctggtgatttgtgaggcgtttctagaatttatgaggtcaggggtcaagtgagaggttgtaggtcacaagtccatcaagaggccaaggcagatgaaagggaagcgcctctgtctgccaacccaccagctctgtgacctgccttccacctccacccacaggaagctcaggcaggagtgaagccggctcggggagcggcagtgaaggctgcagacggcgaacacgcacagggcaacctccttcccccgggacacaccggcctcttgttccaagggaggactggctcaatcctgaccccgtccactttaaatacgggtatgcagcaacacagaatagatttaagaacacaaacaccctgctagttgtaataaagacaaaaacgtctaaagttaaaaatcaaacaaacaaatggaaatgaggaagcctgcattttgcccggcactgtaactcctggtttcacctgattttgcgactcatatttcctcaccttgattttctcactaatcaatcaaattgttggaatgacgcagagtctaactaagcaacgagttagcacggaaagcgctttcatgctgctgccctgcacagaagctgcaagttcacacggaaagaccctttccgctggctcgattccaaaacagcatcagcgcctgagtcacacagatagtggcgtgcggtcaacgcttaacagccggcaggggtggaggctgatttgcagtatttaccaatttacgtgggataaatacgccagccacggctaatttcaaggtaccagggagatgtcgccaagggtagagctgggaacaaatgtgcacagttggctctcacaagctgagacaagccagccatagcacgtccctttcttagaaaggtcgttgtaaagtcaggcagatgtaggtgtgaatctggcttccttcctggctgtggcctgggagacaactgcttcccttttctgagcctaatcttagaaggggcaggatcacctctgtctcacagaggagctgtgcaaattaaatccagttacagacaggaaatgccaggcaataagagacgaggtctgtctgtgggggcactggctcttgaggccggtgtctctcctgcaggtctggagacagcgtggctcctccctggggcctggctggaccgggtggccagaggcggctctcggtagagaaaccttcccaggctactgagacatattcagtccctcatcaggtcctctgggagcctcctgccctggtaagggtttggccagtgggtggtggccagcaagccatctccctgaccgttactgacagctgttgtcggcggtgggctgagtccagggtcgcccccttcatccctgttcatttggcttccatggctccctgctgttccagcttcttcacagctgtacacactccacggttcgccatcccacaatgcctgctgggcagcccccgagggtgctccatctccccttgctgctccttcctcctgggccggacaccctctcctatcttccataaactaaatcctaggcctgcctcaaactccaccagttccccaaagcctcctggctcctgccttctactccctgtgtctccccatgccaccacccatgtgaatttcctagggctgtcctatggccggcacaggagatcaatgctgtaagcagatctgtgctttcttcctgagctgggaagagcccaagggcccttgtttggcaaaggcttatagatgatgaagaaagggagattgaatttccattcccagccaaagaatcacagt

SEQ ID NO: 70312 - DNA, 1972 bp, Homo sapiens
ggtggcgagtggtcgcctccctcccctccaagcctcagccatgtctgcccctggggtctgtctccagcctgcactggaccatgaaaagcaccaagccaggccccgtgtcctactcatcctgctaacaacacaaagcaaacatctgtgagtgtttattatgtgttaggcgcaggcccacgcgatcctcacagctacctgggtgacaggtcatgttattgaccccattttacagatgaggacacggaggctccgggagctggagtagcttgagtagagtgacacagcacaccagagtgaaggcgggacccagccctgcggtctggctgcagaacacgcgcctttggccccaggctaagctggctgcgtcagcgcatgtgctcagaccaatgctgcgaagagccggctgctcctcacacgagctggagtccagtgtcaacttgagcacgtgcacgtcagccccagatgcagcttgccgtgaggagcatcgggaaggacccagcattcctggggttagtcccatctctgggcctataagaccctgtagagaactgtgctggcatacacttaacaatgggacctggacatgggcagctgtccctgggactcagttcggacccctctcatgtcacggttgttaccttccttctcatggttctcagattccctgctctgcgccttggcttccccagccctattaaaggtccgactgtaaagcaaaccaaacagacacagactctcaaatgctgagttcccagtgcagaaatgctacctcatccctgtcacgaggaagctccctggcgccgcccatctgcagccatctggcctggccactcctcacctcactgaaagcttgaagcaaagggcggttgacgtaaggcatctacaaaccctcagtgacctggcagggcggctgggccttgggacagggctgtttactctactagggaacaatgactcgccagtgctgatgaataatgggaaacaaatgcagggccatgtaaacatgtcttgtccccactcccaagtgataaagtcctgagatgaagcaggtgggaagagggggctgcccctctgcacccttttcccactgcggtccaaacaggcctcacccccggcccccgaggaggggaggaaatcatggctgccaaatctcttgggtggcttgaggccatgaccagcatctctagggaagggcctgaggccccacacacgcctcttgcacccctgtgtctccagcacttcaagtgggccccacactgaggtctgaagagcatccaactgcagcagctgggtctgtgagatgccgcccatgagcccaggacagactgggctcacttggaggccctggccaggcctggcagggcactatgagaaacagtactttggccctctccaagaggtgctgtgagcccagcacacaccgccccatggtcccccagcatttggcacactctattatgagaggtgtcctcatggaaaaggggaacccacacctgggagtcaggctccctgagttctgcccctgtcttgccctgtagcctgtgggcgatgcccaggccttatccctgggaagtgctcccagagcttgagggattgcagactgcgtcctccaggaagtcctcctggaatgcctgtggtgtgtgcagccctcctccttctctgccccgtggaactgactgtcagtgcatggatgggtcctgtgtggctggccccgtgtgagaatcccagcccacccccaagccctcacacagaggtgagcgttgaggctgggcggggttgccagcctcactaccataaataacggcaattgctgccagcgaggccccagctcaggcattatcttaataaatccacacaacagctccacaccgggggcattattcttattatccctgattctcaggtgagaaaactggggcctggagatggagagagatttcctcaaagctctaaaagaggcagaaagagaact

SEQ ID NO: 70313 - DNA, 1840 bp, Homo sapiens
gcaacagggcaagcagtgtgaggtggtgggggaggttcttccagggggctctgacctacttgaaacaatgccctctaatgtgcctggtcattaggcacccccccgcccagccctagccaggtgcccctcaagcttgatggcagcaagagaagcttcttccaggctccatccccacaaatcaaggcaggaatggaggcaggttactctgtgacccctcagcccagaggtagctgtcccttgtaccaagttgtagtccccagcctgcccccaagcgattgctcaggtcaagtttgctggtgaattatcaccctctaaggtgtgcaggcagagagaaagtggttccttctaggcagctgttgtctatgtggaggactcagcgagcagaggaggagggaaatggagagaagacacacctgtaagcccctcacaggtgaaggaaaggaggcggcctgtggagcagagaaagaggaggtcacttctgccccagggcgccgtcagggaggcctcttaggacaggtgacctgggctagacacagaacataaagaggatatttgcctaatggatgagaagaacaaatagagaatctgccaaggtccatgagtgaaggcgaggactgaataagtgagccagagaatgttctggaagcatcttgaaaactgcagagcactgtatgcacatgacagtgatgtgctggagggctgcgtgcagaaacggatgagtctgttttgcactgcggtgggctggcaggtgggaacccatagccaggcctccagcacgggatggcttggaacctctggatgccaagctgggatagtggaggccgaaggctgctgaattgcacagtgactttggcagggagcacactatggctcctgtcacctccaaatgacctatgagctctctgtgttgcaaacaagtcatctcttacccctttgggatgtaagggatgactcagctttatgttctgtcatctttctaacggtccctagcctcaccaaactgctgcaaagggaaccccacagctgtcctatttttcacaccccagagcctgcaccctttcccctgccaggagcacccttggtttcccttcttcacagggcccacccctcctcttctgcccataccctgacccctgcctccagctgggtgtgaggcttcctctgggcttccgcagtcccctggagttacctcatcagagcttggctcgctctgggttttacctctgtcttctcctagactgggggttctcgagggcagggcttgcagctgatctatatctgaggccacagctcctagttggggcctaagaaattattgctaaattagtgaatgaacgaacaaagagacaaggcagacatcatttaactgatcattcttattgctccaggaaaaaggaacaataagccaaaggaggatttaagccaaatctttggctatttgacagggtcttgagagtgaatccaactgcctactccgtcctgcccacctccacgtctgtgcctcggtggggaagctggtccaaccagtaggatggcagtcgtcaggggcccagagtggctgacctggggccctttggctccccctggtgacgcctcacacaggtctcagtggaagaggagggaaggaagctcccctcttgcttccttccaggtacaccctctcggacccaaccccagcggccgaccccagtcctcagcactgggaaagccagaggccctggacccggcaggtctgctctcagaccacaccctgtaaccttagctaaatctactgacatctctgtgggttcaggttcctcctctgtataggtgacctacctcttagagttgtcgggaagat

SEQ ID NO: 70314 - DNA, 838 bp, Homo sapiens
ctggcccttgaaaagcccatgtaagaggacacactgcaacaacagcaacagcaacccacagatacatctgtgaatatgctcttgtgtgtgttaaaagaaaagcatgggctcacggccaaggcacactctggaaagttctcagagagagagagagagagcttctgtttctggcactctgccagattcgatacctttaatcactcccctgattataaccaaaatgctggataaaatattgttttaatctttgtttttttttttacacattgctgagttagcatgaaagcaagaaagttacggatctccaacatgaagcaaaggtagacgccttggagacttggagcctgtgtttccatagctgtgtgaggtgcaagggacaggagataaagtctgggcttcccccaaggggggctgtaataggagacctcttcaaagcctgagtccaaaaggtctatgtctagagtgtcagaaagaatgaaaagcaaatctcaccccgcagaggagaacagaaaggaagcctgcctgccctgaccttgacattgggttgagagaaacatatctccactgagaatctgtaaccacaagctggccctcacgtgattttcagtttgaattcctgctacttgtgtggtttaaaaaaactcaagttgaaaattgaaactggcccctgcttgatagtacccgcagtcagcttgcagaagcaaaccttaaaccttcctcgaggaattcagctacaatctcagccttatagaaatgtccacaaagtccccaagaaaatgagcagctcccagtgaaaattaataaacttcacaaggaagataagagaaccagcagaaac

SEQ ID NO: 70315 - DNA, 1024 bp, Homo sapiens
agggtctttgacaaggctacaatcagggtgggagaacagggtctgcaatctcacctgaaagcaccaccggggaaggatctgcttcctaactcacatggttctggcagaattcagctccctgcagactgttggactggaggacctcagctcctcagctcctggccccatgggcctctccacaatggcagttgcttcatcactgctggcaagatggaggccatacacttacatcacctcattgcagaaatgacattgtcccatcacctttggtgtaccccattggctagaaccgagtgtccacactccagaggaagtgtgtgactactgggaggcagacattgccgagggcctcttagactcggcccaacacagtaatcaccaggggcccaaggcagaagtttcgtcagaagaaaaggtggtacctgagccggtcatggttccttgccaggtggggtgacccaaaccttcattcctaacgagtctgggctctcagtcctgccttaacagggttgttgtggtttctgttgacttttttccagtcctgattctgctgtcaaggacctgggccctctccagactcagggcactttgaccctggggatgtcactttgacccaagccctgataggttgctctatacctgtgatgctctttgctgtggtgactcagcaggactcctagtcctttagggcaggagaaatctcactgggagaatcatccacctcaaaccaaacctgcacccaggaaaacctcttgattttgattagaatcaaaccttcctaaccaaatttagcacttatgacatctgtctcggaaacattgaccttgggagaaagccatggctagcaaaggaaacccatggtggcagaagctaacttgggatgtggctggaaactgttcggaggatgaagtcttcagtggaaacgtcacagggggaaatatggatgccagtgaaaataagttcagtgaaatggaaatgaacatacaaataataagttagaaactgtttgaaacacactcgatag

SEQ ID NO: 70316 - DNA, 704 bp, Homo sapiens
gtggggagctgatgaggctgggggtggtgggcccttggctggggcagggcctggggcaggaagcaggatcggtcctgcatctctgttaagagccgggctgctcagcagcaggcgccatggcagccgaatcccaggcagaaggaagcagcctgcggagggtgagcaggcaccagcggctgccctgtagccagggcactccgccgccaccgcacacggcacaggctgagcgctgggggcaaatacagctcagcaatgctccgcgctgcgggtggcagcaagaacccctggggctgggggcaaacaccaggcctggcacctgggcgtctgcacctccctgaagctgaatccacggcacaatctctgctcagcctctgtttgcagtgtaaacacccgctttcctgtgcgggccgcctggtcctgcccgccctccctcactgcgaggggtgcaaggggaggggcgtccacttggctcctgcagtgtcctgggcccgtgggtggctgtgtttgaacgtgagcttcagatgggctgtttgtgtggcaccaatgactgccgccaaagagagggagaaggctgggaccacgttggcactggtcagcctggagggtgcagacacaggccaagggctagcgacagcctggaaaactggcatggtgtgggcacagtaagcagagggcatggtgcagacgaaggcagggaaccagga

SEQ ID NO: 70317 - DNA, 1945 bp, Homo sapiens
ctcgggggtcctctccattgggacattaccctacttcctctccaccagggcacacctggtacacacctccactggggacctaccacacctcttcttcctcctcttcaccagggcacacgtggctccctcccactgcagggcctttgtctgggttgatccagagacgcaaggacacagtgcccagggatctttccttgggggcctgtccacctccctcctgtaaaatgggaagctgcgtgtcggtgactgcctcgcccacaggctctttcttctctgggactggccagactccctccagatggccccacccctgccatggctgattggtccaggctggacacgtgacccaagtgaaacccaatgggattctctcctgtgattctgaacccggggaggagacctggagcctggaggtggcagcgacttgggagccgcgtgggcctgtctgttccacacactgccttcttgccccttccttcaacctatggccccctcagaggacaacctttttccttaaactcctcggacgaggttcctgtggcagccgagagagtcacgcagcgggggtgccttccccgcctgtgggggagccccaggcggcccgcacagtctcgtggtggtcgggcctggccacgtgtgctcctcggtccccatgtggccccagcagggcgcccgcctccctcccagggcttcctcccccaggagggatagcaggaaggcaggcaaggacaggacctgagtccacacctcgtccgcggtcacctgcctgaccaggaggaaggggaggggacaggagtgattccacggaggtcacctgggagctggggctgggcgaccccagggctggatgacctcagggctgggtgacctcagggctgggtgatctcagggctgggtgacttcaaggctgggtgacctcagggctggatgacctcagggctgggtgaccccagggctgactattggcggagcacctggggtgggtgccatgggcacctgagagggaactttgacctgagcggaggtcagaaccctcctctgaggaagtgccccaccccactgagctcccagaggctggtggcaggttgaacaggggactatgccagcagagggactgccttccagagactttggatcatcaccacgatgggttgattttacaaatttagccactgtcaccggaggcctggctgaacttcagagtttcttctccagcgtcggtttcttggtttgtaatggggagggctggatccccctgcactgatactcccatggcatggctgcgggaggggcgcccatcctgctggcctggtggctgtggagcggccggaggtggcgtgtgccaaagctgctgctggtgctccctctggctgccttggggtgatgacaggagctgacggcttggcagcagctcccagggaggcagcagccgggctggcggcgggtggtggcggtggtgggagggggcttctggagagaacaaagcactgaggatgctgggctccaggggcgacagaggagtgggggatgggggcagggttctggagtgtgtggcccacagggaggccatggcacgggtgtgtgtgcgggtgtaggatttggaacccacctcgtggttgtgtgagcccaggcaggtcacttagcctctctgggcctcagtttccacagttgtgcaattggaacaataccatcattacattattgtatccccagtgctgagagtagtgagtggcacagagtaggcattcactgaatttttctggagtcaacaaatcaataggtttgatggaagacggaactggctaattcatgctcagctcagtgatgggcccatgttcgttctagagaagcagtatctttgttattgctgctgtgattgtttatcaagggtgcagaggactgagccagcatggagtcccagggcaggagaagaaagttggtcagt

SEQ ID NO: 70318 - DNA, 944 bp, Homo sapiens
gctgctggtctcggcagcagagccctttcccatgcactgcgccatggtgggtgatgacttataagcacatcctctgggttttgtctttgtgctttttttcaaaaataagaaataaacctaggggaccccctgggaaaactcgcttgtcttggaatccagagaaatctcacagtgaggcatctctgtccccacccggggaagacagatggatggcccctgtgcagcccagcacccaggcctgctgccgtggaggcgtgggtgcggggccgctcaccttcctgcgcagccccacgtggctgccagacggtcccttccgcctccccaggggcgtcccgctgtgcagttggctgggactgcacaagcagagggccaggagtgaggcagggcagccgcggtgagccaggggcccgactctgccaggcgagacaaatatttacaagcaaggccttcccttctgtttggcaggcagagggctttaaatattgatttttcaaacgggaaattctaatcaaaggccctgtttgggctgcaggaagtgcaggccgggggacagggctcctgaagtccttctctgggattctccccttgcccacactggctccagttctgggctgcctcccaggaggggccccttccccgagggaggctgcttgtcccgtctgctgtgggtttcaaaagacaggaggttccacttggtggagtcaagaggccgtttccagggcagagaggctggagtcgctgtgggccaagcccccgctgtgtgccaggcacggggtggcaggctcttaccacctctgccttgttgaatttgggaacagctacttgaggtggctaccatttgcgtccctatttgacagaggagaatggaggttctgaagggtggggactgtctctcacacacagcctggccttccaggtgcccatgatgggtggaaagtgtgaac

SEQ ID NO: 70319 - DNA, 1379 bp, Homo sapiens
ttgcaattccttttggaaagtggaggataaagagtccaagatacccagggggtgggggcctgggaccgtgaggccagtgacagctagggctggggatgcagcgtgggggtcttcttccagtagaaaactagtccagacagaagaaactgaggcagagaagtcccaggatgaggccaggcactctgcagctcagcagcctgggaggaacctgtccagcctcttcccgatgatctcagggggccgatggccagtggaggcctggacaggcaggactgtggggacagtgatcaggctgctgcctcctttgatctgatgaagacacctgttgggggcctggcagcaggtacccctgtcagcgattccagcagcttcctcctgcccgcccctctctcagccatgctgtggcttctggacaagctgacagctgtgtgctgtgtgtctgtctgtgtccacccctgcaggcagcctgccctatgagtacaagatcgtgatcgcgggcaaccacgagctgacctttgaccaggagttcatgcagcttcctcctgcccgcccctctctcagccgtgctgtggcttctggacaagctgacggctgtgtgctgtgtgtctgtctgtgtccacccctgcaggcagcctgccctacgagtacaagatcgtgatcgcaggcaaccacgagctgacctttgaccaggagttcatggccgacctcatcaagcaggacttttactacttcccatctgtgtcgaagctgaagccggagaactatgagaatgtgcagtcgctgctgaccaactgcatctaccttcaggactcggaggtcaccgtgcggggcttccggatctatggctccccatggtgagtgggcctgggtgctggtcctgcctgctggtgagaccagagctgaggctgagcgcagggggtgtaggggatgggagtagcagcagggagctccggatgcgaggctcaggactgaatcttgaccccttaccctctgtgtgacctaggcaggtcaccgctgctctctgggcctgttttcccacatctcactgaaaatagtattatcagctgtaacctgtgttatgctatgctgtactagctcacttacaggcaggtactattatctccattttacaggtgaggaaactgaggcccacagtgggtgaggaccttgccaaaggtcacacagctaggaaggggcagagctgggattaaacccaagcaatttggttccagaacccctgcctttaatgaatattctataatgctaggaatctttctctaatgctgtcttcctgctccatacaaaaaaagatgcatatgtcaggggctgggggagatgatgatcgtaataatgatgatattggtgatgatggtgatggt

SEQ ID NO: 70320 - DNA, 1670 bp, Homo sapiens
agatgtatacctcacaaagtgcttccaaacaaaatttctgagggaggcaggggtaattatgtgcaggctgtgggagaagagtgtaaaagagcagagattttgccgtgatacagaaatgagtttgaattctggctcagaaacttcctaagatagttgtgtgactttggaaaagccccttcaccccacaggtttcaagtcctcgtctgtctacaggagggagtcaatcatgacattcacaagactgctgtgggcacaaatgaaatcaggggcatgagacatgttgtaaactggagagatttagggcgtttccacacacatttcccagctgattctcacagagaggcagggaagaagacgtcaccaccgtcagcgttgtttatcgttcttctccacatatcaggtaagctacgggaacaggggccctactgttccccacagggccccagggcctacaacatgcctggcacaagcagacgcgccatgaacacctgaataaacgaatcaccaccccttcgtccctgggggtgggcagcagcgccggccttctcagggcagtgagacccacggagctgcccgcccgcccggcccctcctcggcctgtcgcacgcgcgtggccaccccgaatacagccttaccgggaacccctcctcgattctccgcctagctgggccggcacccgcgtgcgcggaccccaagccgcggggtctcagaggggctgcccattcggcgtctctaggacgctgttgcccgagagacgacggcagtcgctgactggagaatgagcctacgcgcctggcaagaagctgagctgtgattggtcaattggagataaacgaggagggggcggggccaggtcagtcccgcgcctccgctcccggaagaaatttccgccggaagtcccgttctctggggagcgggaaccctggcgacccgtgtcatgggagcgggtttctgttacgtgggctttagcgcgagctgggcggtcggcccggtcccaccgaactgcatagggccgtgtagccgggggaagtcagccccctgctctgagaagcagactctgcatctgtaaaaggctaagcgtgcccactggggcctgtggtcaggattggctgcagtgaggtccgcaaagcccctaccgcatcctgcgccttcgttagggtgagcagtcatggggactcgcattgtgccaccacgtagcgggtctcactgggtccgcttgtctgctcgaggagacagccggtgaggacgggagctggcctgctttgcccaggctgtaacctcagcctccgcccatacccacagtaagcatccattccattgatattcgctaaatgagtgaattattactaagacagagggccgagtggaagcgccataaatcacgtgagtgaatgtaattgttgtcgctgaccctatggagcacttcccttgccaggcactcacccatcctaggtatgtactttacatgtaattgtcatcttcatttgtcttcacaacaaccctgtgaggtgggtgctgtggttactcccattttacagataggtaactgaggcacacagagcattttgttcaaggacacactgccagtcaggggtaggagcagaatgagaacctatggagcttgctcttaggcaccctgccacactgctcactgtgggagagaagcagcc

SEQ ID NO: 70321 - DNA, 945 bp, Homo sapiens
aaaggtccactcgctcttgcccctgcagtctacccacaaagcagccaggagagcttctaaaaatgcaaagcaggtggcgttcttctgaataagccctcccatggctccctatcttagtacaaaagctgaaatctcatgacctgtgaggccctccagctggctcgcagccacccctccaaaaccgagtgcctgccagcgcattgcccacccagctgcagccaggccccccactgctcagcaccatctcctcagaggcccccccattcttccacgggcatgttccctatccccttagagcacgcttgggcctgaactgatcttgggttctgtcgcctgtctaccccactggaatgcaaactccacagaggcagggctttctctgtcccctgccgcatccacagtgccgggaacagtgcctggcatggagcaggtgcagtcgaatgaccgactccatgaagtgaggtgagtcacccaccacgcagggaagagtggacatgggtaaacaggcgctgcctgggctccaggcacactgactgcatcctggctgcttgactgatgtggttaataaattactagaaggcaagccctctagggcacagcagactggatacttgattaacccagggtctgtgttaattccaggtgccaaaataatttctagaatttcacctgagacctagaggtagttcatttgaaaataaacatgattttccagaaggctcgagctttctcaaggaaagcaatgccctggactctccttccacaggaaatcaggaagacaggctttggaattcccagtggggaagcacagttggaggggccggcctcgggcaccacagtgcgcaacgctgaacacagggctcccaggcagagactgggaggtcccgacacctggacccacaggtgcacccgcatctcccatgcttttaccctttctcctccacc

SEQ ID NO: 70322 - DNA, 635 bp, Homo sapiens
cctgcttaaacccttcccagcctttccaccactctccagacaaagaccacgctcagctggctccagagctcagtgcgtctgccccaccagcctcccctgcgtcgtgtacggcacactccctgaggctccagctttactggcctcccttcctgctcctcgaatgggcctttctccctcctgcctctggatctttgcacatgctgttccatctgccgagaacattctccttgtcctctttgcctggtggacgctgactcatccttcagattatagcctaagagtcatctcctccgggcagccttccctggccagagagtccctagattgagctgtgcagctggaagccagtgtagacctctcccagggaacctctaggtggcgctgtagttacaggtgagtgtgtgataatttgtaggtcgtgagctccaccaggccaggagctgggtctgcgtcggggctgcttccatggcccccagccaggccttggcccctgagaggtcctcagcaactgctggtgggatgaatgaacaactgatgcagacgggcacattaaccagcaagtcagaatgttactgagagcctaaccacagccggcctggcttggaaggggcttgttttacagaaaaggaacctgt

SEQ ID NO: 70323 - DNA, 3036 bp, Homo sapiens
ctcacgccaccatgcccagctcattttgtttgtttgtttgtttgtttttgcgggggacagaatcttgttctgttacctaggctggagtgcagtggctccatctcagctcattgcaacctccgtcttccgggttcaaatgattctcctgcctcagcctcctgagtaagtgggactacaggcatgtgccaccatgcacggtttttgtatttttagtagaaacggggtttcaccatgttggccaggctggtctcgaactcctgacctcagatgatcagcctgcctcggcctcccaaagtgctgggattaaaggtgtgagccactgcgcctggccctgatattaacatttttaaataggtttgtttaataccaaaaaaaaattttttttaagtgggttccagcagagatgggcaaggcaggagctgtggagtggttggtactgcaggggccgggtggtaagagcagtgctgggggtgggcacagaacagccacaggcgtgggtgagcaccaaaggccctggatgctggagctgggcactgctgtcaacttcgtaagataagaacaaggagtgaaatgtggggtcaggtgtccccagatcagccaccagctaacaggaggggaaactgaagtgcagagggaaactgcttagtcaaggtaacgtggagactcccagttcctcctcctcctctcactgcctccatccccaggattgggaagacctcatctcccctgtgccctgtccgcctttttccctgatgccctagggcatagggccaggcagctgggccagccctggagcaagctacggactagacgagggatcagacattgtagagaggcagcaaagtcccagggcctgacacagctcaccttgacgggttggtattgatcccgccctgcaccctcgcaggagctgacgccacagaagcttgcacagcacttgctctgagtcatggctcccactccactcactccaggacctggtctgagtcacggctcccaccccactcactccaggacctggtctgagtcacggctcccaccccactcactccaggacctgggcgcccaaacccctttccccacattcaagtccaaatgtctcctgacccctttgaatttctgccagtctcctcctctgaccagtccaggactgcaggcagccggttccaggatgctgccaagtctgacaaccgttcttccagcccatggtgccctagataccagggcactagctagccaggccacaaagccaggagcagccacggccttaggtcagaggccctccttgtgatcgggatggagggcagcttcccacggccctgggcagctgttgacagcccagtgatgggtgtggagctgggagctggccttttggggaactgaggacttacctggcctgggagagctgctcagggctgttctggtttctgggaatacagctgagacccagactgaccacgagtctcacggggtgtccatcctgtgaaaccgaccaaaatgaaatgaaaggaagagaatgaaataaaagtcagcaagagatgggtcagctagtgagaaaggctgtagcagaggcgtcatggagagggagctactccatatttcgtggtcaggaaggcttcttggagatgatgggtttgaagctgacacctaaatgacaaataggatatctggggctagggcctctgccaggcagcagaagcagcataagcaaagatgttagagcagattggctgttcaaggaagcaggaccctgtgtggggagtgataaggaggagggggccaggctggagagatgatggctgatgcagattgagtgtgtaatgtcccaggcacccctggaagcattttacccgggttaatttcttcaatcctttcagcaaaccactgccgtcagccctgatttacagattgggaaatagaggcacagtgaaatgtgagatgaagtaactttctttttttgtagggcaggggatggagtcttgctctgtcaccaggctagagtgcagtggtgtgatctcggctcactgcaacctccacctcctgggttcaaacgattctcctgcctcagcctcccacatagctgggactacaggcacctgccaccatgcctggctaattttttttttttttgtatttttattagggacggggtttcactatgttggccaggatggtctcgatttcctgacctcatgatctgcccgccttggcctcccaaagtgctgggattacaggcatgagccactgcgcccagtggaggtgaagtaactttctaatcattagctgattacctcatgacaactcaggaggtgaggtgcttggattatctgcatttcgcactgaggcccagggagatgaagcaacttgcccaggttaacccagctgggaactggcaggcagagtggctccagtctgtgccccaggctgccacctgtcttttcaggaggccctgttgtgccagaaagcattgcacaagggctctgggtgggctgtctccttcccctggccccggaagccctctccttgcctgtcttgggtggctgtgttgccaggcagtcagcatgggctttgcaaactgacagacgtgtttctaatctcagctctgccactgaccaggtcagagaccttgaacaagtcacttgaccctgctgtgcctgtgcctactgtatcccctccaaagctcaggttgaaatttaattgccattgtgacagtattaagacatgggacctttaagaggtaatcagggccgggtgtggtggctcacacctgtaatcctagcactttgggaggccaagctgggtgaatcgcctgaggtcaggagtctgaggccagtctggctgacatggcaaaaccccatccctactaaaaatacaacagaattagctgcgcgtggcagcaggtgcctgtaatcccagctgcttaggaggctgaggcaggagaattgcttgaacctggaaggtggaggttgcagtgagctgagatcacgccattgcactccagccattatcctgtgggtccggcctgtcttgctctcc

SEQ ID NO: 70324 - DNA, 4365 bp, Homo sapiens
gacagttggagggaaggtgtgtaagacagggaactccctgggttttattctggggacagagccaacctgagaagcatcccagccagaaggactagtgctgatgggtggggacctgaggcctggatggagctggaggggagtttgttcacaaatgcgagaaggaaccacatgaatggatagacccaacagggtccatacatacagcggaatattattcagccctaaaaaggaaggaaattctgacccctgctacaacatgggtgaacctcgaggacatgatgctccgtgaaataagccagacacaaaaggacaaatactgtatgattccactcacagggagcccctagagtagtcagattcatagagacaggatggtggtttccaggggctgggggaaggggcatggggagttagtgtttaacgggggttgttgcagtttggaaagataagaaagttgcagggatggatgctggtgatgtttgcacatgacgtgaatgtacttaatgcaactgaactatacgtttaaaatggttaaaatggcaaattttatgtcatgtatattttaccagaactttaaaaggaaaaaagagagcactgcaaccagagccaggacactgggccaaggatggaggcgcagaggtgaggcaaggctggcactgggcccatcagtgttccctacctgttgctgccagcgtgggttgggaaatgtcgggccaggtgtgtggacgtggaaggtccagatgcagcctggggcactgggaggaggacagcagcaggcaaagggctgctctcacgtatgttctgtcccccaccctgaatctggttcctatcccgtttttgcccatggctggaattagccagttctctcattgacagaaatgtctctgtgaacagatcaaggtgtctggcaggttggcagagaagctgagacctcccacagagtcagtcctcatggtgctgggtttggtaactgggtgagggatgccagctttcattttcccagtggtgtagggagaagaggtcaggctgacactgtctggacgcagtgtgcccacacagagctggcatggtcaggggtggcaacgatctgtatttccagctttagagaggaaatagacactggagttcgagcacctccttgctccccttcgtgaatgttggggtgacgtaccatcaattcttgtgattcatggtggttacatttataaagtctccacatacactggatcagccaagactgagtcattgctcctaggggacggatggggttaggttccatccaggctctgggcacatttttgacaaatgatcgatacataaccttgttttatgtgtgttcctggttaaagacaccgtaatcgataacttgttttttttttttgttttgagacagagtgtaactctgtcgcccaggctggagtacaatggtgggatctctgctcactgcaaactccacttcccgggttcaagtggttctctcaccccagcctcccaagtagctgggattacgggcatcatgcccagccattttttgttattttgtagagatggggtttcaccatgttggccaggctggtctcgaactcctggcctcaggtgatccacccaccttggcctcccaaaacgctggaattccaggcgtgagccactccgcccagcggataacctgtatattgttgattcattaaccttgaacccacagcaaacagcactagaactcatgcctaaggagcttctctaatgcatggactttttgtttttatctgagacagggtctcccaaagtctgatattgaaaagtggtcctggacaggcgaggtggctcacgcctgtaatcctatcactttgggaggctgaggcgggcagatcacctgaggtcaggggttcgagaccagcctggccaacgtggtgaaaccccatctctactaaaaatacaaaattagccagacatggtggcacatgcctgtaatcccagctactggggaggctgaggcaggagaatcacttgaacccaagagatgggggttgcagtgagctgagatcgcaccactgtactccagcctgggtgacagtgagactccatctaaaaaaaaaaaaaaaaggaaagtggtccttagcgttcacttatagacgttgccaatcagtcccacatcatatcacaagtactgggaactgaaatttgaagaccgcaaggaaatgaacatttacgactcctggaaaatagcacttccttatgcaagcatccatgccatctgatgatgttttgacacatgaattcacttttcctccttcccaagtgcctcagccaccagtcctctccattcttccaagtagtgtctgtgtctgatgtgagcagggcacagccacaactctttgtaccatgggcaaggcagtaacttctcttttgagagaattgttcaagagatacaaagaagtctccctggggcctgaacactgagttcaagataagaaatgtttataactctgtgctggcagccaagagctggatcccagttgcagatggggctatgcgtagcagtgagagtgggagacacagagacagggactgagagagagagagagagagatgggatcagggataagggcagtactgccaggcactgggctgggtgctttctgttcatcacatttaacttcacaatgcccctcacacaactgttttctcccccatggtacagatataaaaagtgaagctctgagagatgaaatgatgcttgcgagtcttgtgcactggctgtctgatgccaaagcttgcagtctcaaccatgatatcatgtgcctgtcccactggaggctggatggggggctgagagagctggaccatgaaacccttgcccagctgggtcctctctttgtctctggaaagtggggagggcccccagctgctgtctacatgcagtgacgaagagggggtgagtcctcagccctgctcctgtcctgcccacatctgggtcacactggggatgacagatgtccagtgtggctggccaagaatgaatgccggtggacaggaagagaatatgaatgcctgtggctggtggcagggtgactcatctcgggccttcggtcacagcctcaaattcctgtgccagagcctggccctcctgtcattagtcctaagactggtcatgcaatgcaggagggatggatgggtacaggaggctagaggttctgaccccagctgtcccctccagaagcctcagttccgccgcagccctgagcgtgaggtgggggtggagggcagttagggcaggactgtaggtaatgcccctctccagcaaagccaacacgtcaggaatagatgggaccccctgtctgcttctcagctctcctgaccttccccgggacttaggacctgaccctgccttgctctgggcctccatctacaaagtgtctatgtgatgaggcagtcagcccaggtattcactaaggcctgaagctcccatgccctgggattcctgcccagagaaaggaggcagccctgctcccagctcccctacccctccaggcaaggcaaaagcaaggactgcagcagaatggggaagctcagttgaacatgaaccacccaaccaatccaggtgcttctcaggtgacatttggaatcctgacagcaatgtcacctgttttacaacaccaccagtcattctgcagttgaggacactgagccacaaagagggcagaggcctgaccccaaagctcacatactctgcattcctccaggtctcacggagaagggggagggcttcctggtccactccagctgggggcgctatggcccggcagaccagggtcctccagtgaggagctctggaccaaggtctaacttggctccatgtactgctgtgggcttgctccacccagtgccaggggtaggtcaaggtcaaggggcctcttaggcatctcctaagggcatgctactatccaaatgtttgtgtccccactaaaggtcatctgttgaaatcctacaccttaaggtgatgatctttggaggcgggggcctttggaaggtgatttgatgagagggtggcacccttatgaatgggattggtgcccttatcaaagaggcccagaggtgaggatgtggcaagatggcaccttctacgagccatacctctcaccagggaccaaatctgctggtatcttgaacttgggctttccagcctccagaactgtgagacagagaaataagccaggcgaagtggctcacccctgtaatcccagcattttgggaggctgaggtgggtgatgacttgaggtcaggagttctagactagcctggccaacatggtgaaaccccatctctactaaaaatacaaaaaattagtcaggcatggtggcgcatgct

SEQ ID NO: 70325 - DNA, 4313 bp, Homo sapiens
ctactcgtgaggctgaggcaggagaatcccttgaacccgggaggaagaggctgcagtgggccaagatcgtgccattgcactccagcctggggggaaaaagatagaaataaatctcttgtttgtaagcccctccgctttaaggtgttttgttttcgcacctgaacggactaagggactaagggaccaggaatcatccaggcctcagcttcccaaagcactccccactccccagttcctacagggccccgaccccagccccagcacccgtcattcacattttttacttacaaaggaaactttgaaatggacacttcctgttactttcattcaatgaaaaaaatccccagcacttgaaggcaatcatacagaaagcctgcaacaacgcagagagtagactcttcaggtggtggtgcctgctttaggctggctctccccgggtcaaaagggacgtgataaagtgttaaagtgatgttaaggatcaagtgggcaccaactgcgactcccctcccaccccccgacttaacagatgtcaaggaaaacagaaggaagccgtttctctccaggacatgcagtgtctgctggagttttggaaaaatgctttctctcgagtcgctgcggggagctcccaggctggacccccccgcacaggtcctccgccatcgccctcccagcccccgcccccaatccccctcccagacccggtccccgcccccatcccccgccagacgtcgtccccacccccatccccctccaagccccgcccgggagggcgtcctgcccgctcattgggcctcccgccggctcatttgcatggtccgaggggggcggggctgacgtcgcgctgggaatgccctggccgagacactgaggcagggtagagagcgcttgcgggcgccgggcggagctgctgcggatcaggacccgagccgattcccgatcccgacccagatcctaacccgcgcccccgccccgccgccgccgccatgtacgacgcagagcgcggctggagcttgtccttcgcgggctgcggcttcctgggcttctaccacgtcggggcgacccgctgcctgagcgagcacgccccgcacctcctccgcgacgcgcgcatgttgttcggcgcttcggccggggcgttgcactgcgtcggcgtcctctccggtatcccgctgggtgcgtctggggacgctgcccgggctccacgtgcggagtgggtgccccctaggccggggagcgggggatccccaggggtcgcggggccctggaggagcgggcatcggacgcggacacggcggggtgcatcccgagggccccctccgaggcagatgcttcctgcgggggcgctgttcctgggcccgggaagggggcgttggaaccccgagcggtccgggccgaagcctgggactctcgtgcgtccccacccctacccccatcaggcgcccgtgcatgaagggagaccctcacctccggactgagagtcggagcgtctcggagcgacggggagtagggagcgggacccggggcggagggtagtgctggcccctgcggactccgggtcccctgtgtcctctcgggaggggctggacgggctgagctgccgaggggccgatttgccctgggccggacaaagagtggggctttggccggtcccccacggtgggctccttccctctggggattgagggactcaagacaccccgcgcctgcgcttttcttttctttttttctttttttttttttgagacggagtttcgctcagtcgcccaggctggagtgcagtggcgtgatctcaactcactgcaagctccacctcccaggttcacgccattctcctgcctcagcctcccgagtagctgggactacaggcgccagccaccaagcccggctaattttttgtattttttagtagagacggggtttcaccgtgttagccaggatggtctcgatctcctgacctcgtgatctgcccacctcggcctcccagaatgctggggttacaggcgtgagccactgctccctgctgcctacgctctctgggtcgcagcccagccttctgggggctgggtagcctcccagaagggcaaccctgggcatcctccagggcaggctaactggagtctagtggggaggggtaccttgaaagaggaaagttgtttcctcctcctcctcctcctccagtgtttgggacccttcctgggggctggagtgcatccctggacaccccccaatcccatcctcttctctagtttccactgacctaggcccaccctcccctctccggctcagtactcctggaaatgagattccgtacatttgaatcttgtcctaatgaaatatttgtccatgtgggtacctgtgtgtgtgtggtgggggtgcagacggagggtttgtttctcactagctggaactactggggtgtggtatgcttcctgggaatttgtgtgccacagtcctggaggcgaggagggggttgtgagccagtaggcaggggctggggcaagtagcattgtgaagctattgacacccagacgtccccaggcaggagattatgcccccattagcccccttttatctgggcttccttaacaatggactctttgccctgcctgccagagccagcagggagtgactgttcagtggtgaggaagcgggcagaggaagccctgccattgggtaggagcagtgggcagcccctgggctgactgggaggtggggattagggattagacagtcctggctgtctgccttcccctaagccagggggagaggagcaaagggcacgaaatgtggcctccaggaggattagaccgccacatgatcatttgcacaccctggggtttagcaacaataaaagtcagcttttttgtatcccaaggtggcctgtggacacccacatggacaaatgtttacactgggacagaattcaaatgcagaggtcccaggagcctaaagtacactcactctggtatagaaaggattccttactgggcagaggacaggtgcagcctggggctttcccaggcaggacacagggaggctcaggaaccaccaagtccctggaaggtggatctggaggcgttggcaggagccactccctgggttccagggctccaggttcctgctttaaccccctgtctcacagagggctgtgcacttgggggctgctgagcatgtcccagaggctgcatcctggacacagcacctcagtgcatctgagctgaggctaacttggcaggagggacaggcagaacctgccagccacgtgcaattccacccctctggccactcagggaaggagagctgtgagtcaagatcagatttgggtcaggacaggctggggcctgcctgtccctgtgcatcccaagatttatggctggccaggggttgggctgggaggggtggtcttgcatgccaggagagtgcagatcagcctgagaggccaggccagtaagtgaggtcagatctcctgcacctgatagcattaaggccatctacaccaaagctctaatgctgatatgttcctggcctctatgtggggcatggaggtggggcatggaggtgaggcctgctcgcctgggcttctggaagtgggagactcattcctgtggctgaggcctacagcagtgctgtgtggtaggaatacactggaagccatgatgtcattgtgcattttctagaagccacattgaataaagtaaaagacacaggtagaattaatttcattgagcccaatatatccaaaataatatcattttcacatctattcaatataaaaatttactaatgagatatttcatactaagccactgaaatccagtttgtatcttacacatctcagttttgacgagccacatttcaagggcgtgatagccacatgtggctcccatagtagacagtactggtctagagaaatgttggtggcatccttgctgtctggtttctggccttgccaaaagtattaccatcccagtgtggtacattctttcatgtatttgtctcctgtccccagagcagactctgcaggtcctctcagatcttgtgcggaaggccaggagtcggaacattggcatcttccatccatccttcaacttaagcaagttcctccgacagggtctctgcaaatgcctcccggccaatgtccaccagctcatctccggcaaaataggcatctctcttaccagagtgtctgatggggaaaacgttctggtgtctgactttcggtccaaagacgaagtcgtggatgtaagcagtttgcttatctggacgttgtcaagttagaaaagctgttttgggatgggtgtggtggctcatgcctg

SEQ ID NO: 70326 - DNA, 871 bp, Homo sapiens
aacgtgccttatttgcctgtatcctcagggtctagcagagagaagataatttgtaataccaaaacaccattaaattcagctgatgctttcataagcgctccttggaggaaggactccatttacttgacagatctgtgcaagacagcagcctggcgcgtctaacctgcagccagttgcatcctctgtttaaccttgtttgcggaagctttctctaaacagccagcacttgtctgttcccacatgggtccgttctcccagtgaatcaccgtggtgcctgctgactgctctgtagcacagtgcttcgcaaagtgtgatcctgggaccagcagagcagcagctcctttgagcttattggaatggcagaccctcaggtcccacctctgacctgctgcatgggaattctggggagggacgcagaatctctggttccacaggctctccggtgatgctaatgaataccggcatttgaacagcaccgatctagcccctttcagtccatgagccaacaacccttggtcctgtctgtggtgacccagtgtgactctcatggggagcaaggagaggaagttgaagttcactgacagggttgttaaggggattatgcaatagatgagacccatgggcctgaagtccgagggtgtatgttagttccccgttcttttgacccatggattaacctactctgtgcaaagggcattttcaagtttgttgccctgctcacttggagaaagcttatgaaggatcaggaaaattaaaagggtgctctcgcctataacttctctctcctttgctttcacaggccttggtatgttcctgcttcatccccttctacagtggccttatccctccttccttcagaggcgtggtaagt

SEQ ID NO: 70327 - DNA, 2565 bp, Homo sapiens
tttcttattctgtctcgtttctttcaatatacttatcacaatgtgtggctgatatttattatgcctttttcttttctattctcttttcttttttggggcaggggagctgttttgccaccaaaacctaagcccatggccgtcttcttcaccgatatgactggttctcatgcaagcacctagatggccctcgcccataattactggctgcagttgagtgaatagcggtcattatctagcgcccaccgtgtgcccggcccggtgccgggagctttgctttccgtctctcacattaggcccttttaatccaacccccaagaaggagacacgaccatcgtcttcattttgacgattttgagtgggggttccaatgacttgaacgaaaggagccagggcaccaatccgggtttgtgtagcagatgccggtgagacccgactactgcagctcgggggtggccggacccggggtctccccgctgagtctcggggcttcaccggcgcgtgggcacaagcacagcaccctcgggtcgggggtgctaggagggctaagagcagcaggacttgagtgacacccaacagctggtctgatctctttcaggcgccaacgccagacgccagcctcccagcggaccctctcgcagacccaccttcaccccacgcgccctccccacacagtccacgcgccagcagcttcgcggatgtcagtgaacgctcttcgcttgcgcagtcagaacgtcctccgcggccgtgtgaacatccgggtcacaggcgcataaggaccaatgagcgaaggcatcgcgagccagggggcgcggagaaggcggggaatcatggccgcccccagtgttccgcgtccgggggtttgtgggagttgccttgacctgcagctccgccaccgcggacccgccttctgccctcagcagcagacgctctgtcccgcccgggcagctctgcgaggcagcggctggagagggaaccatggggactgtgcacgcccgggtaagaggcccagcgacccgcgggctgcgaggcctctgggccagcagggcagacgggcgccgcggggagacgctctcgtggctgcgcccagggttcaccgggagagagggtgccaagggtgccgggctgggtggaggaggccgaaaagaggtcgcctcgggccagcgagtcttgcagaccttcgagcaggaacctgataggagggacgagacttggctaaaggtcactcggcgagtccgtggcccaaaggacttgccaactttctgtgatgtcttagaccgcagtgaatgtgctctttctttgcatgattttaagttttctctctttactggtcacttccagcctttccccgctcagccgctgctggagccattgtaggctcctagagcaacaagaatcctttgaagtcttctaactcaaacctatctaggggtcctcttttctcctgtctaccgtgcaaaagacggaaccgctctctgccttacttcctgttttaaagtggaggtagtaatagtacctacctcgcctggcttaaaagagaattaaaagacaatgcatgtgaatacttgggtgcctggcgcctgactaactgtactggttgccaaactcctctcgtttatcctaatcttaaataagggccagataatgagttacttctccaaggtcacatagttactggttccaaatggcctaaaacctcagatttcctgagtctcagccccaacactacttttctactgcaactttgattgcttcacttgacctgcatagacgttttcagtagttccccattaacttccaaaaaaatttagcacagaagtcgcagcctgacatcgataattggacttaacttccctttatatgtctttcattcagatcaaacaccgtttctcttctgacatctctttgtgtaactgtaataggtctgttgctcagtgtgctcgataagtcaatacactcagacagtgggttgcagcagagaaagagtttcagttgcagggccgctgaacgaggagatgggaaaagagaggaaacctcaaatccatctccttcaggagtttggacctcatgtttttgctgaagtgtggagatccttgattggtggaagagtgaagggtgaagttatgggacagggagatgaggaaacttctcatgctgattccgttcctctgttgcggggaggagtcttcaaactggttggcagcatcagttttgctggaattcgagatctgaaaaacatctaaagcaactcttaagcaaaagccttatgattctaattttagaaatcctatctgtaaaatcaatggggatgcaaatagtatctgtgacttttggttactagcaagtaggtcagagtgcaacctgagctcttcctgccatcttggctcctgtggcggcctgccgggagcaggacttctgaaaggaaatatgtctggaaggctgtggtccaaggccatttttgctggctataagtggagtctccggaaccaaagggagcacacagctcttcttaaaattgaaggtgtttatgcccgagatgaaacagaattctatttgggctcatgtata

SEQ ID NO: 70328 - DNA, 1522 bp, Homo sapiens
aataaaataaaacaaaacaaaataaaataaaataaaataaaataaaataaaataaaataaaataaaataaaataaaataaaataaaaatagccctgtctggcagtcctcgggatgaagccgtttcctctgcttccaacacatgcgaggcctgtctcccctcctctcccctccctggcaccccacactgtccccagggcctgctcttctgctcacctcatggtaccggcctgcaagccatttcctggggcctccccgtcgcctcttccagaaacaactcctggaactccccttggaggtcaggccaatgacctgtgccccgcattgccctccatcctctaagcttcccgtgggtagggacaattcccagttctgaagggctccccctgccccgggcctggctcttggcagaagcttaacaacagaccggccacgttcgtgtgacctgattctctccggctttcaggacgtcctgaggctgcacccacgtggcaatggtgtctgtcgcgctgtcgcctggatccggcaccactagcggagccgagcagagcccagggctccaacgcgtagggaaaaggctgcgccgctcccggggtggccccacgccccttctctgagcttgagcggcggcgcgggacggggacggctctggccgggaccagcaggcctcgggcatccgggacgccggggccgcgctccaggccaggggcgggggcgggaccggggcgggggccggcggcggggccgcgccctcggcctctccccggggcgaccgggcggctccacacgcgctgcgcccgccgccggccccacgcgcggcccatgtcctccgcgccgcgctcgcccaccccgcggccccgcaggatgaagaaggacgagtcgttcctgggcaagctgggcggcaccctggccaggaagcggagggcgcgcgagggtgagtgcgcgcccgcgcccgccgacccccggggacctgcccggcggtgcccgccctcggccctagagccccacgaggccgcccccgccctcccccacgcaccccgcccggcccacgcggctgcgcgaccttcgggacaggccaggcctttgacccaggacccgtaaacaacggccgggacctggcgcgtggggccgcggtggcctccggagtctgccaaacgcgcgtgcgggcgcctgcgcggcggggacctcgggccaccgtgcggggcccgcgcctgctctgcctgccgggtgttcagctcttccctgggccagcggcatagccagccgcgcggggtgaccgttcattccatgagcagtgacgctcacgtgtgcagggcactctgggcagacacggcctgggggacccactactgggtgttgcgcgggcgccctgcagggtgcggggctcagggcgtgcagggctgaggcctgggaggcctgcgagcaagaattgcagagatcccattaaaaatttttttttttaaattttttactgcgtgtgctcacgaaacactaccaacctcgtacgttttaaagattgttaga

SEQ ID NO: 70329 - DNA, 969 bp, Homo sapiens
caaaaacaaatcagaatggagcttataataatcacaccgtagctaagacttgggcactgctgatgtcccaggtgctgtgctagatgcttcctgcattattaccttgtttactcctcacaccaagctgggaagtcggtgttatgtggttattcccattttgcagatgggcaaacacaggcttagagaggatcgaggtcatcctgccagcaggtgagatttaactccaggcagtgtggctcttcattgccgctgaccctgcttaaactggaagaatgattcagatgggagtcatcttcccagctggctcctagtaagctgatgtcattcctggcatttaagctgcacccagccccagtgttaggaagacgcgctagaggagacacattagatcctttttgtgctgaatgaacttgttggtgtttataagaagaagacagaaccctagtggcttcatgctactccaggaccaagtccagattctcgccagccacccagcgcctgtccagcccagcccagcccagctccagctccagctcccaggtcttctcccttggcctggccatggggtcttcgtttgctttctgtgggtcccatgatcttccttggctgaaagccctcacgtcccctgttctctctgatctgacaactctctgccctgttgacttaaatgttgcacctccagcagggtgggggcccctctttgcccattggcaccatcatgtccctgcattcctgtttcaggttgttggcacagttcctgtcttcctggggtgtggtgcattcccatttcactgggagataatgatgaccatttacagtgatctttgtgtatttgcccagcaagcaagaggcagtctagtgtagtggttagggtgactgctcttgaggccagactgcatgggcttgaactgatctttctgggccctggagctgtgaccctggggaaggtacttccccacgctgtgcctc

SEQ ID NO: 70330 - DNA, 1150 bp, Homo sapiens
tgcgtaacaaggtcagctctgccatcacgctctccagcatgttggtgagattggccttctccgcccgcagggtggaagcctcccgcctcagcgccgagttggtgaggcgcagggaggtcagggtgtcaataacgtcatccatctgggcattcggagacgctgccaaggctgggctttcagctttggacgtctgcggctgcaccatgctggccagaggtcagccacacgctgagatccgcgggtggaccaagagggtgtggtgaccaggtgggcccctgtagaaatgggggcagtgtggggtgcacgacggcagggcgctgcgagacccccaagccgagggcccgagagaggggcacgcggtgccaggccctagggacttcggccccggtcccacgcggctcctttactgcagacttcgcggactacggagccagacgggtggctggacctgctctgggccctggaggattaagaaaagatgttttcaaggtttcagttgcgactagcgggcaggagggtgaggggcggcgtggagggcccgcgcgtgggtggcgaggctgcacaaagccccgcggcgcccgccccgcgcccgcccgggggagaacaaagggggctgctccttggcggccgcgggcctgggggccaccacagtggcggggcccggccgggcagggggccgggggcacgcgtacctggggtctcgcggttcctccgcggctctgtccgccgccggccgtgaccaagatggcccgcgcgggggacgcggccaggccgatgaatcaccgcgcggaccgccgagaactgcttcccggtcagcgcagccaagcgacggcgctggcgatggcggcgggcggcctccggcaggtgcagggaccgggccaggccggggccggggcaggggcggggccggggtcgcggcagagggcgggtcaccgcgcggcctttgtgcgggcggggccggcgcggtggcggtggcgggcgggccttaggctggccccgctggttgccatggataccgaccgctcccgcgcgtgcggagacgaccgctgccccgcccccggaagtgatgcacaaagtcccacccccccccaccccccaactcgggctgctgccaatcggggaagactgtagttgctgcggcgtcttcatc

SEQ ID NO: 70331 - DNA, 507 bp, Homo sapiens
gcggtccaactgcctgtgctgcctggtgttgcccagcttgcacccgcccccagctctctgcccagggcactgttgtgaggttaggggcagacagcgggtgtgggtgcagagcacagggccgggctgatgtcagcgtccacagtaggggagcagccccttcctgtcgctctggtctgtgctccacttggccgtgctgggtgaggtcatccttccaggccctggtgaaatgtcatctctggaggctcaggcgtcctccctcctggggattctggagcctccctttactgccctcttgtggctctcaggggaagggaagtggcagcccgggactcagggcccggcacgaagtaggcgctcctggtggccgctggggttactgaccgtgggaagcgtgtagctccagagtcacagctgggctctgatttcagcccttccactcactcaccctacaacccgggcaagtcagctttccctcggagcctctggttcctcttctgaaaaatgtgg

SEQ ID NO: 70332 - DNA, 678 bp, Homo sapiens
cctccttctgccgtgcgaccaccctggcggcggtcaccaagcccttggcgtgcccctgtgactgtgtgtggattttttctgtgccctcacagggcagtggtgtcacccttctcgcccatctcagggaagggatgggacggcccggatggcagagactgtggggacagagccaggcactccccatggctttccgtgcccagcacgttgccaggcctcttccagggtgtccgggactgaccaggctgctcctcagggggcagaaggcacttttgggtcggctttgagggaacaccaggcttcgccaccagggggcggacgtgcccctccagagcaggcagtgcctaggaaagcaggcagggcgtgggcaactgaggtcaccacctgagggccgtgccccggggagagtgggcgagatggaggctgtctctctctcccgcccagcccgcagggctccagcctcagctcccccacttgctgactctgacctcggacatacgcctcggcctccctgggcctctgtttgtctgtctgtaaaatgggactggtctcccacttggcagccttgtggggacgagtcggggcagtgtgtttagtggccgcccctgtatcatgcctatagtacccctccctgggccccaaactggccccttcaggggtatgctgtctcctccctttggc

SEQ ID NO: 70333 - DNA, 1312 bp, Homo sapiens
acgccggctccgcctcttgcacacgccccctcgcctgaggccccgccccgcccgcgatgcccccgcccccttccccgccccgccccccggggcgccgagacccgcccctgggcccgcccccgggtccgcccccggcctccgtttgcgccgggtctgtgctggccgcgcgcctggcgctccacgctgagcctctccgtgcaatgattaacccggcggggcggccggcgcgggacccgagacggaggcgcggggccggggcgggaccccgcaggaccgctcggcttcctgctctcgccggagtttccgcgtagagggcgcatcgccggcccggggcccttggtgcggcgtggcgcagggcgcggcgtggggcgcgcgtgggcgcggcgcaggcggcccgggtcaccatgaggactctccgcaggttgaagttcatgagttcgcccagcctcagtgacctgggcaagagagagccggccgccgccgcggacgagcggggcacgcagcagcgccgggcctgcgccaacgccacctggaacaggtaaggccgcgccctcccggccacccggaggccctggagccgggggaggggacccctgagccgtccgcgggctaggggccgccccgagccaggaacgctgccgaaggcggcgcggcgcttcacagtttgcaaagaacttgccccgccggagtggtgcgggcctggaggaaagttcagtgcagcgtggttccagaacccagggaagggagcgaggcccgccagcgcccggggctggcccagaagcgcccggcgggtgggcggcggggtgggccgggaagccgcgtgcccgcctcctacccggggtctttccacgtctccactgcggtgctcgtgacaacctgggaggctaacggagcaggaagtatttttcccattttgcggctgagcacgggagcctcggggctcagtgggtgggtcgcgcaggcttcctgtgtctctttaagctcccttcggctttcccttgagaggccccctgtcctccagctgtcagcagggggtgcggcagctgcgaggcattctttagaggactctcctccaggggtcattcccagacaagcaggggcctgggaagccccttctcccagctttgtttgaggagcaagtccgggatctggaaaagagacggtttatttagtggaactccccagcgtctctgctccctaggaaaatgagaggcaggagaaagtgaggcaggctgttcgcgggaggcagtggacactgttcgggggaggctgtggacactgttcgggggaggctgtggacgttgcccctctc

SEQ ID NO: 70334 - DNA, 1224 bp, Homo sapiens
gatgatctcgatctcctgaccttgtggtccacccaccttggcctcccaaaacactgggattacaggcgtgagccaccgcgcccggcagccttagagagttttacaaacaggggcaggaagcatgagggggtcgggagccccacagctggctagggacgcagtgatgatcctgaactccgggtggccgtggaggtagagaaggggcaacagtccacaggacttggatgtgttggggggtgggagaggcgcaggggtttcctggtttctggcctgggcaaggtggggttaagaacccagaaaggaagctggctgaggtttggccacatagtgtgtgcagaggacacgggagcaaggtcctgcggcagtgaccagagggcatctggtgatacaggctgggctccagcagggccgggctgggggtgcagggcctcggagttgaagtgggtgtgagcagggtcctgcagggatggctatcctgcccttctaggagagagggaaagaggaatggggcctgatgggcaaccagggggctctcagacctcaggactgcagtgttttcttccctctgcccccagcatccacaacggggtgatcgccgtcttccagcgcaaggggctgcccgaccaggagctcttcagcctcaacgagggcgtccggtgagtgcctgtcccaccttggtccagggtccttgagtggcagggagggctaggcccagagtcgaaggccccagccaggcccctgacccgccagccacgcctgtgcttcctcccctagaggccatctgtcaacaggagagcgaggcccaagttagcagtggccatggggccaggacgtggtttcccgagctgccatgtgggccatgacctccataaaccacttcaggcctggtggccctgcacccccacagccccagagaaagttcttcaaggggaagcagggtgggacttggacagccgctggagatgacgctgacggcccccactggtgctgagcatcgtgaaggatatttattctgttaaagaggaaggacccacctgcctaacgacgggagtgttattcccggaaaagcaattccagccctgccaaacacccctcgtttcctgtgaatagccgggaaatgaggattgcgaagcagcaggctggacacacacccgacaagctgctgccccaagccaggtggcaggagcttcaagggagtctagggttgccatttgtagtggagga

SEQ ID NO: 70335 - DNA, 808 bp, Homo sapiens
ccagcacagctggccacgttgctcccttgacggagggcctctgggttccttcagcaatgtcccttgagtacctgttgtgccccatcccgagcccacgcccttcccctcccgcgggggaggccgaccagtgagtctcctccacgacccaccattagctggaagctgggagcatcccaggcagaggggacagagctggggcaaggcccgcttgggactatgccctcctcatccagaggggctccccgtccccacctgctggtgtaaaacctgcccactggtgtgtctcagctcaggcagtgccctggctgctggagaactttgagccacccaggcttggtgtagccctggatggcaggaccccagcccctgcctgatgggacccgcatcctctggtctgggaaaggcccctgagccgctcgtgtgtgtcgcccgccacctggtggccactcttgggattgcagggtcctgcatgggaacctgaaccctgccccccaaccagccttggccacctgtgccactgcctcccgcccagatgaaccaaggggcctcctccctgggtccccacgtctaccctcagcccccacagtctattactctccacgcagcggccagcgaggcccatttacaactgcctggctacaggctccccgcatccccaggatggaatccccgccttgaccttacatggagggcctgtccccatctgctcccatcacagccccacaacctggccccatggctcgcctctttgggcttcttggccctcccaccatccccttggacaccagctccagtggggcaggggctg

SEQ ID NO: 70336 - DNA, 2107 bp, Homo sapiens
cgatttctccctcctcggaatgcagaacaatttttgccccatcatcattgactggtgacatctcttgatggttttattatttaattggctaattttgttctcagaaaaaagatacgcttttataagccacagtatctttaagtttttttacgtactatatattgttacttttttagtgaccataaagcctcaagaaaaaataaataacagcattagaaaacttagccattacttttaatccttctgcactgaagcctaaaatatgaaaaaatgtgaaaaatagaagttgtgaaagtttctgagtgtccagcagattggaatctctaggacaaaataagtcatgtgctctgcccaaagtctcgaggcaatccagttgaatcccagtttagttaagtctttcttaaagagccaaatgtgttcatattgaaagagattcagtctagaatctatgaatggggacagggagtccctgacctctggccaacatttcaaaaagcctactggaaatcataaatctaactcataataaaactgctctggctaaaacacagctctttgcttttagccagagttacaggaactcagctcaatattagtggcggtctagaagccaaaaccgccgaatgtcagtcacacttttttgtttttgttcttttaagcctcagtgggggtgaaagttatatttttgatcagttaaaaaaaaaatgaaactgaattcccatttcacaaatattttacttgtgttgaaacaaggtcttgctctgtcgcccaggctggagtgcagtggtgcaatcacagctcactacaacctcgacctctcggggttaagcaatcctcccacgtcagccctcccaagtagctagaaccaccacgtgccaccacgcccagctaatttaaacagttttcgtagagatagggttttgccatgttgccaaggctggtctcaaactcctggggtcaagcgatctgcctacgttggcctcccaaagtgctgggattacaggcgtgagccaccatgcccggcctgttttttaaaaattttccatttttgttttttgacgagacgaggtctcattatgttgctcagtctggtctccaactcctgggctcaagcaatcctcctgccttggtctcccaaagtgttgggattacaggtgtgagccactacacctggccaaaatattttacagtaaaatattttaaaacaagaattagaaaaatattagcattagaaaaaaatgaaaatcttttgagctgtttaggggagaaagctccaaggaacttaaaaacaagtgatactgtcttatttaacagtccatttactcagccccatactgtgtgctttacctaagtgttcacacttaatctgtacaaccaaatgaaggtacataatacaccctcgctttacagatgaggaaacttgagctcagagctcagtttgtccaaggctgccaagctggtaagtgatacggccaggagattaactccaaagccccactgccaggcagataacagaacatttcctgttttcattccttaacattaggagcaaagtgtagttctgtaggcttcctgttgggtgttttctggtaaatcgtaacaggaatgactccaggtcgaggtttaagcctacctaaaatgaaggccagaacacagctagaacacagcaatattatcttgccattttctttgctaggttaaactgggcttgaatgatctgagacatttatgacctgatcactgtggcaaaactgatacaaagctggctcctggcatggacctctaacagcagaaagaaaggcaggatcacatcaccatggactcatttggaatcaggtaaagtaggtaaactgacatgtctgggtatttatttactgaacatgatgacaatgacccagcctaacaaccatcacagtcctttggctctcaggggttaagcaaattgaaagggatttttgaaaggcagagtataggaaaaaagggctaacacctttggaggagtatttcataacatgagacttgagcttcattaaaaggaagtagccaaattcaatggaggtagatgtctgcgtgcaaagtgcctccattcttctgagttatagccagt

SEQ ID NO: 70337 - DNA, 2115 bp, Homo sapiens
gtggtggggcggggggagggaatcacctgaggtcacgagttcgagaccagcctgaccaatatggtgaaaacccgtctctactaaaaatataaacattagccgggcgtggtggcgcacgactgtaatcccaactactcgggaggctgaggcaggagaatcgcttgaatccgggaggcagaggttgcagtaggccaagatcgtgccacttcactccagcctgggcgaacaagttaaactctccatctcaaaaaaaaaaaaaaaaaaagggcggcactggaaacagctgggagtgacagggccagggatgagggatcgcaagctgctggtgagaaaggagctcagaggctgcctggcctacgggccaggagacctcagcgcaaaaagcgcaggactcgttcccctgctctacagctgagtgcccaggacggatctcactggctgaaaaaaacagaagagaaggcacccaatgcaaaatcaaatgtcagcgaacgaggggtcctttaacaggcggcccacacggcccctcctggcgccgagacccagcccctccgggccaccccggccaggtacgaccagcagggtcacctgcgcgcgtcccccgagacggggcctcctgatgtgaagcgaccccagtggcacctcacacgattcccgagggttgcgggcggcctctcctcagccctgcagctcccacacgcggacaccgcgggcctcggccatgtccactgaccgaccttcctcgccggaactcctcgcgcatcgccggcccctcagcggcgactagcgcgcgaacatcctggaagacgcgttgccggccccacgtgagccgacgccccaaagcgcggctgctggcgccggctacgagatcaaggtcggcgcgtgcgcgcttgcgcgagaccggcattctcagccccgcgccggtttccagggagctgggcgcatgcgccgcgtaaggggcccggccggcggaaggaggtgctactgccggaagcgccggcgcgcttgcgcagtagctgaacgcgggcgtttctttcctccctttttttcgaattggttttgggggtagattcgagttacaaaatggccgcccggagcgtgttcggcgcggttcccccagctgtctctggctgaaccggcgctctcgcctccctgccgaacacagcgtgaggagcccccccagggatatggtgtttgagtctctgggcttgccgagcactaagtcctctgagttccgcagcgcagcaccggaagcggccgagcgcgctcagcccggcgacccctgcgggctccagacccctgcgccgctgcgccccgggtttcgccgcaaccaagacccagcgagtgcagcggcggccgccgaggaggtgaggagcggcggcgggcgcgggaggagaagaggctgagggcgggagcctggtgctgagagcccagggccgggagggcgggagcgggctcgggcctgggaggggagtgcgagtgcagggctggggactggaccctggggagggaggtgcgggttcagcgccgggggacgggcccctggggaggggtgcggggccgggggaccagaccctggggaggggcttaaggggctggaggacgggaccctgggaagtggggtacagggctagaggtcgggactctagggagggagcctgggtcgggcgcacgggccgggcggggcgcgcggtgggggagcgacgggtggagggtggggtgggatgacagcggcgacgcagccccggctgtttttgaagcggggcccgggccccaccgggctgcggcgtccgactcgagtgagactctcccctgcggccccgccggaggtagggggctggcagggctgtcctggcgtggtcttctccgtttccttcctagcgattcctctcgagcttcctctccccctggccgcccctcgtctctcttctcttgggcgcattacctctctggcctgtcttactgcgttcccgggttattcatcacccatttgctcggttccattaagaaccagcttggagattaggtatttctgtctccttacttggcccccttgttgttttcctccaacaaggcacttcactattaagtgtagccaaatctgtgttttcgttttaa

SEQ ID NO: 70338 - DNA, 469 bp, Homo sapiens
ccccgcccacttccaaacggccagtctccgccaatcttcggatgcccaggacagcctccctcaaaccgctcgcggggtcccgcctccacccaaggtcctaaacgccccaccaacgggatcacgcctctgagcccctcccgccgccccttcagggcacctctcccctcccccgctgctaccccacgggatgtgtactttgtcacccgccctgtgcgttgccacctccaccaagtcccctcggctgacttctgggaacttcctccgcagaacccctcaagaggtcacctgctcccagaaggtggtctcctgggggacaccgtggcaaagcccttccggcccccctcctctgcacctggcacagtgcagagtgttgcgcctccatttcctcagctgcaccatgggggacctttccctgccttgcctccccaacatgggggagtgttgatgaagggggaggtatgaggttagc

SEQ ID NO: 70339 - DNA, 3385 bp, Homo sapiens
tctgcccacctcgggctcccaaagtgccgggattacaggcatgagctgccacatggggcctaagagtacagacactgagatagggagactatcctgggttatccaagtgggcccaatctcatcacataaattcttaaaatcggggaacatttcctggctgtggtcaaaaagagatgtgacaacacaagaatggtcaggtaaatgcaatgttgctggcactgaagagggaggaaggggccacaagacaaggcatacaggcagcttccggaagctggaagaggcaaggaaacagattctcctacagttgcccccagatatgacacagccctgcctgcaccttgactttagctcagcaagacctcagttgaacttctaacctacagaactggaaatgtgttaaggcaataacgttgtagtaattattacagcagtgataccaatacgtgggcaagcctgagatgtgggcattgtgtcagctctccacctaagcgcttctatccctgaggtttattttgcaaacacttagaacaacaatcaagcaaagtttagcagaaagaaaaaacaaccacaatccaattgctttaataggtcagtcttgcttcatttttcagagttcctgcccggggtttgcctaatgccatccctctacactattgtaacagcggtgtccgacagcacacatttttatctccaaatgcttggggctgatcttattcaaagagccagacagtgtttttttgttgttttgtttgtttgtttgtttgtttttttgagactgagtttcactctgtggcccaggctggagtgcagtggcgcgatctcggctcactgcaagctccgcctcccgggttcacgccattctcctgtctcagcctcctgagtagctgggactacaggcgcccgccaccacgcccggctaattttttgtatttttagtagagacagggtttcactgtgttagccaggatggtctcgatctcctgacctcgtgatccgcccgcctctgcctcccaaagtgctgggattacaggtgtgagccactgcgcccagccaccagacagtgttaagaacaaaaactttttttttttttgagacagagtcttgctctgtcacccaggctggagtacagtgatgcaatctcagctcactgcaacctccgcctcccaggttcaagcaattcccctgccttagcctcctgagtagctgggattacaggcgcctgccacaatgtggggctaatttttgtatttttagtagagatggggtttcaccacgttggccaggctggtcttgaactcctagcctcaagtgatacacctgcctcggtctcgcaaagtgctgggattacaagtgtgagccatcgtgcccagccacaaaagcttctttagaactcccccgccgtgttttaagtgactgacaggcccagagacttgccagttcagcttcgaggccctggccaccaccctctcctgtctaagcctcagttcacgtcacagtctgtataggaggtggtgggactggctgatctctgagatcgctcttggccttaacattctgcaagactgttattaaactccagctgttcatcttttctccttggtccccaagaagaaaagataactaattcccagtcacgttaggtataaacagctccaatctcaggtccatgagctcatgttccgaaggccaggttccagggctctcccatccacccttgtaaatcattaacatacttgccatagtcctgtgagaatgtgtgtcagcagcttccggccagacttttccctgtgactcatggttctcctttgctgggaatccctgcttctcatctggaaaacagatgaaacccagccatcatccccaggcctagactgcagcagcccctctaatacgggccttttctcacctgctacaaagatagaggcactacttgacaaggttcagttgcctcccttcctcccttccacaccattgcaccaccccaacacccccacctaagctaactccacacaaaatattttctcattctcagatgttgtcagaaattctaccataagcgatcagcttttttttttttttttttaacagatccctgctaaaattcccctggagggagtagccttaaaattattattaagcatgacaccttggtgagaataaaggattcagaagacactttgaaagaggaagcacctgatgggattgggggtggggagagacatactaatatttcctgaggccctgccgtatgcccggagcttcatggatgtggacaactagaacccctgagccccggaagaggcagccagtgttttttcttcatatgttagcgggggcaagcaaaacccagagaggttgagtcatgctcaaaatcacacggcgggccgggcgtggtggcacatgcccataattcctgcactttgggagtctgaggcaggcagatcacctgaggtcaggaattcaagaccagcctggccaacatggtgaaaccccgtctctgggctgggcacggtggctcatgcctgtaatcccagcactttaggaggctgaggtgggtggatcacctgaggtcaggggttcaagaccagcctggccaacatgacggaaccccgtctctactaaaaatacaaaaaaattagtccaacgtggtagtgggcacctgtaatcctagctacttgggaggctgagggaggagaatcactggaacccaggaggtggaggttgcagtgagccgagatcacgccattgcaccagcctgggcaacacagcaagactccatctcaaaaaaaaaaaaaagaaagaaaaagaaaagaaacaaaactctgtctctactagaaatacaaaaattagctgggtgtggtggcgcacgcctgtaatcccggttgctcaggaggctgaggcaggagaaacacttgaacccaggaggcagaggttgcagtgagccaagatcacaccactgcactttaaatgggcgacagagggaaactccaccaaaaaaaaaaaaaaaaaatcacacaacaaatcagaactgagccaggattccaatcctcctgtagccacgaaggaagagatatcagtgtacactctggtattaactcattccttttctggtttaaggtgggaaggtccactggaaagcagagtgtggaatgctaagttgttgttgttgttttgaaacagggtctcactgtgtcacccaggctggagcgcagtggcatgatcacagctcaccacagcctccatctccccagctcaggttatccccctgcctcagtctcccaagtagctgggagtacaggcatgtgacaccatgcctggctaatttttttgtatttttgtagagatgtggggttctgccatgttacccaggctggtctcgaactcc

SEQ ID NO: 70340 - DNA, 1193 bp, Homo sapiens
gtggagatgcagggtgctccagggcaggggcacctgaaaccagcgcagcctgaaacaggcagatcccttctgctccagcgccctgctccatctgtcaatgagaaggaggctaaactagatatccccttgggcctttccagccccaacatcatgggagaacaggtagggtgggccagggcagggagagctggagagcctgctccccttttcctgccccctgaggctccagttcagaagatgttccccttgtccatgaacacacagccttggcaccctctgcctcctgcctggtcatggctgtgatccaggtgaacctgacctacctgtctctggacagaaccttttgacttctgctagcacagctccctggcatctccccacccccaaagctttggtgagcagagccaggtgggactgggcaataggtctggtcattgcctccatttggtcatctcagaatcagcccccttggaggcatctgtgtgacctctgcccctgctgatgctaggttattggttaggctcacagggctggagctcacagaattttgaggggcgatgaacactgtgttaataattaacattgtgtactactgtaaaatgcaaaaataaaatggcaaaattaaaattaatagacatttcattaaatacctacaagatggaagattatgtcatcttttcgatttggtatttataaaagttttactacatttgaaaactctttgtgggttagattttctcacgtagcaagaattctgagagttccagatggtcgacgagaaatcagaaactgaaagttactggtattttagtttatttggcaaacgtgtattcaggacttacctctgctgggcgtggtgttatgaatttacatatgtcaacacactgaattctatgacttaagagccatcattattcctgttttatgcatgaggaaaccgaggcatacagaggttatgtaccttctccaagattagcaaaggcagagtcacgtagccaagaaaattcaaaggcaaaattatagaaatcttttcagattttttttttttttttgagacggagtctcactctgtcacccaggctggagtgcagtggcgctatctcagctcactgcaagctccgcctcccaggttcacgccattctccttcctcagcctccctagtagattacaggcgcccgccaacacacccggg

SEQ ID NO: 70341 - DNA, 1097 bp, Homo sapiens
agattctgcaggctccagtgactcgctggaggtcacccagctggtaagaagaggaactggaacttaacctcagggcttccaccccggctccttcttctgctccacaaatgcagcccaagccttgagggcagtgaataggtcaagggccaggacagtagcctggagccaccccacgagggtgtgggaaccgagggcggggtggcatggtgaacatggaggagggaagcccctatttttcctgaatcccatgccctgggatcccagagcaaggctggccagggctgaccttccttctcattgcagcatctgctctcagggccaaggattgctctgatgacagactacaggcagagcgagtggccggcaggagccacgtgcttccggagcctcctgcggccacccctgcctccgcactccccctacagtccacctcgacacagcagcccaggccacgtttccaaagccaaagtcagatcatgccattcctgttctcatctcacacagaataaaacctcaattcttgtctccgcctgcaagtccctgtacaatccggcgcctgctgatctcatcaagctctcctggaaccaaatcaccagagcaacaccatggcaggggcctccctctcagaggaggaggcattgacaggagatgatctcagggcagacagttctagaccaggacagagctggagctgaggcctgaggcagcaggtgcctagccaggggccagcaaggaggtctgagtgctggaggtcaatgttagaaaatagtcggggcccagaccaggcagcccatgaatgggtttttctttggttcacacagtatattacaaaacggacccacacatatgtagttaactgaatttgtttgtttgtttgtttttgagagagtctcttgctctcttgccgaggctggagtccaatggtgcaatctcggctcactgcaacctcttgggttcaagtgattcccctgcctcagcctcccgagtagctgggactacaggcacacaccatacctggctcatttttgtaattttagtagagacagggtttcaccatgttggccaagctggtcttgaactcctgacctcaagtgatc

SEQ ID NO: 70342 - DNA, 1760 bp, Homo sapiens
cacaaacatgtgggcggccatggtgtgcccagcgccgtgctggcttctgggaacccccagtggacaagacggacaaggtaccggctctcaggggaagtgggagccagtcacaagcgtacctaatttcggagagtgacaagtactctgaaaaagaaagaaggtagggctggtgactggccaatttaagcgggcaggagtctgctgggggacggagaccagcctcaggtctgggttggggacagaagctgtgcctaagtgtggtgcaggatgcagttgcaaaggagcgcttccgatcgcacttgatgctcgccacgtccctgcaaagtgctcccgccccctttctgcaaatgaggaaacgggacgcgcggctcgccgggccaggtagggctaggacgcggactctaggcccaagcgctccccagcgcaagccctcccccgcacatccgaccgcgcctgcgctggagaccccgggggcgtggcctccccggtgggcgggaccgtggtcaccgaggtgggcggtgccagaggatctggcggcggggcggggcggggcgcgcgtcctggcttcgcccttccccggggcggggcctccggggaccgcggggccgttggtttcgggacggaacgttcacgcggctggggcgggcgcgcgggggaagggtttgcggcggcgccgctgccggctaacgcggaggggcgcctggaggcggcgtggcgtccgctctggctccgactccggctctcgctctcgcttctagcccgcgtgcctgcgcagtcccctccccgagaaccatccccttgccccgcccagcgtcaggggtgcgcggccgccgagagaccccggaggcgtagccggctgcggaggcgaagaggtggcagcgcgagctgggaccagcgtctcggaggcgccgcaggtgagggggcggggcgggcccgcggtccctgcatccggagcccctggggaccccgagatcctcaggatccgccccggccccggggccaccccaggactccctctcagctcttcccctggagcccctgcccccgagaccccctcaggatccgccctgcccctccaggcccgcgaaccccgaaactccaagattttctctggactccgagaccccctgaggaccccggccgctagtgggccctgagaactgttggttccggaaactctcgaggttcccttgggacttgcttccagcaacctcctcagaagcccccaggcccggggcatcttcctgtggggagccgtggttcccagtgtccttagccccgcgagaccccgggtccccgtgccgcccaccctgaggctccctctccgacctgatctcagggctaggtttctccaacttgaggtccctggacctgcggggcgtgggtggaagtgttcccaggtctggtgataacttaagacggtaacagcgcgcccgacgaccacctcctaagctgtggtccccgcgcctgcaggtgcagggccgggtttaagttttaatgttctgctgagactcaggtggccccacaggacagtctatagagcaggagacctgaggtggccgagggcggccgaaccggggagggagcgagttagggcacatggggacgcttttaggttgtctcctccttaattttttcattcaaggaactaacattttgtttttgaatgcctgataggctccaggaattgacactggaaatagagatgagacggtccctgctgtcagggcctagggacctggggcataagacaagtaggt

SEQ ID NO: 70343 - DNA, 736 bp, Homo sapiens
cgcccgcggcagacgcccacaccccacaggccacgtgtggcctggacgcctgggacggcggaggcgctccggtggcgccctgagctgctcagttaccagagccgttggggccgatgatgcaggtgaacctccggaaggggccaatgacctggcggccccgccacgacttgaaattttccacaagcagcagctccaggtgggccatggcgccgccctccacgcctcacccgcgttatcaagcgcccgcggaaaaagcgcgggaagggattcgccaagtgtcgcgagaagagagcgagacgcggcaagcgcggagccgttccttagcaacgagttgttgacatttccgagagagcgggagcgtctgtacctctgcggcgtcactgggagcccgacggaaaactgcgctaaaggcttgtctttcccctgcccgaccgaaggagccgaccttgcctgcgctacagcttccttattttcgtcgcctgttctcctgatcctgcgtgttctaaaaaccccttaggctttccatgggttcccagaccatggcggtggcgctgcccagggacttgcggcaggacgccaacctggcaaagaggaggcacgcggagctgtgcaggcagaagcgggtcttcaacgccagaaacaggataattggggtgaaagggcaggggccgggacggggttagagcggcagatgcgggcgaggggctgcgtggagggggaaaggagatgagttcta

SEQ ID NO: 70344 - DNA, 565 bp, Homo sapiens
gtgtctaaacacggacacaactgaaagtctgtagccaaggctgcactctggtgagactgaaaggtgtccatgtggaagcctctgaccgctgctgcttgattggatgagagttcagagtttactttccttttcagtctcccagtggacaaactctagtgtccctctggcgattgactgcaactggccagggccactccctggtatggcctaaaggccagcaggtcaacagatttgactgccttgtacagaaggaaggaagggcctctcctgtcctttctggtcaaaggtccctgatccctctgtgtgttgcaattgacacacgttttgtccccctctttctctttctaaattattccatgaagacagccacacctcttgctctggacgtctccaaatcaggtgatctcacgtggcctcagagtttccacattcctgccccctctcctgggctggccccaagctgagttcatcctttacccttttttcctcatacctgggctgaacacccagtgtgacaaggccccagagctgagcactgatggcaaagtgacctgtggcaaagtgt

SEQ ID NO: 70345 - DNA, 433 bp, Homo sapiens
gcagcagctcatctgtggccactgcttcccagggacttgccagaagggaggtgcagggcacagggaaataacccacctctatctgacggcttcaatggtatcgaatgtcctcagtggcagcacgcagcacagaagctgaggtgtggctgcattccatttggagaattccactgtgattcatggtgtcagctgcgggttcaaggtgtcacaatttaattattaaacatcatgaggcattaggaggcttgggcacgcactgataagtgatccatttctaacacagctggtttattactgtttgtggcagctcctgcacgaattggtgtccgttaactaagcaatggtattataattacacatttaaattatgtatgggaagggtgtcagtggtagaagtcagactgcagtgattactttcagtcttcagacctcc

SEQ ID NO: 70346 - DNA, 1340 bp, Homo sapiens
tttcttaaaccaatgagaattcatgacaaacaaccttttaaatcaccctctctcctgattcgtccttttttctttaaaaagttgagcttctctttcgttctccagagcactccccaaggcaacttggatgtgtgtcctggactgcaatgctcacgttggcccaaataaactctttatattgattttacctcagcttattccttttaaatagacagaggacaataaggaggtcagtatggctgaagcacaatggaagaggaagaggctagtagatgtgattagagcccacaggggctggaggtgatggcgaaggaggaggcaggtcatttaggggcttttctattggaagaacttggcttttactctgagtgaaatggaaatcccttagagggttttgggcagagttaaatgttgaaatattttttaaacgatctaaaacgtaaggaagcaagagcagaggccaaaagaccaatcaggaatatattacaatattccaggcaagaagtatgaatattatagggaatgtttttctgggaatgttacatttgagaataagaaaactaaaggccaggtttttttgtttgtttgtttgagacagagtctccctctgttgcccaggctggaatgcagtggtatgatctcagctcagtgcaacgtgtgccttccaggttcaagcaattcccttgtctcagcctcccaaatggctgggactacaggcacccgccaccatgcctggctaatttttagtagaaagggggttttgccatgttggccagactgatcttgaactcctgacctcaagtgatctgcccgcctcggcctcccaaagtgctgggattacaggcatgagccaccgtgtctggcctaaagatcaggattttggtgcataacaagtacattttactatcctgtgctcctcaagggaaaattaagagatttttgccctgttagcttaaggagtgttaaacattttgcattgtcttgagcactgctactaataagtgatctaatacctggcacatagtacaccgcaatattcgtggaatgaataaatacatactcaattaaatgggtaaactgaatgacaatatcaagtaacttgcttgtgcagcagcattcatttccctccctcctttttttttttttttttttttttttttgatacagggtatcattctgccacccaggctggagtgcagtggtgtgatcacagctcactgcagcctcgacctcctgggctcaagtaatcctcctgccttggccacccaaagtgctgggattacaggcatgagccaccatgccccaccaggattcactttttctgcatactctggtggtgt

SEQ ID NO: 70347 - DNA, 2875 bp, Homo sapiens
cagttcacaactatactcagttatgtttgcttctctccttctcaatagtctgtgaggttccttcaggtttggaactgtcttttattaatctttacatctccagcacctagcgcagggcttagcaacaatttttgttgaaagtatatacactgtaataaagggcagtggaaagaaaatatgtgagttatcaacaccagctagagaagccttgtctgattcctgtgaaatatattcatttcccttaggaaaaaaaacaattctaaccctattgctgtgtaacttagcttcttgacttcgaacggtattttaaggctttgaggagctggagcaatgtatactcactagaggcaaagtgcctggtaagtggtctggtattgatcagcaatgatcagtaagtactgggaagtgcgttttcagggcctgagacttgcaagctagtgacagaccgctccagcttccagtggacccgggcgggggcactgatcaacccacttgagcagtgggatcaaggtcttcagccttagcagtgggagcctctgcccggcccccttcgttcccgagaccctcagtcagcgtctcctcccaagagggtcccctccacccagaatgtcctcccctgggggagaccactctgtctgcgggccccctcccacaggagggcccctcttcctcaaggtgaacctctgtccccgatacccgctcccaagaccgagaccttgttacggccccaccctccacaggccccttaccccccggatcccctcccctgggggagacccctctgtccgcgggcaccctcctataggacgcgcccctctttctcagggtgaacctctggttcccgatacccgctcccaagaccgagaccctgttacggccacatcaacacaggtccccctccccccggcgtcccctcccctcggaggagccccgtctgcgacgcttcccagtcaatcacccccagcatccctccccgctctcacccagaacttccgccgcgccccctcccctcaggcgggacttccgccggcgccccctcccccgcggcgccgtctcctcctcccgcctgaggcgagtctgggctcagcctagagctctccggcggcggcgcagcttcagggcagcgcgggctgcagcggcggcggcggttagggctgtgtagggcgaggcctcccccttcctcctcgccatcctactcctccctcctcgtcatcctcccccttcgtcctcctcgccttcctcctcctcgtcaggctcgacccagctgtgagcggcaagatggcggcgcccaggccgccgcctgccaggctgtcgggcgtcatggtgccggcgcccatccaagacctggaggccctgcgcgcgctcacggcgctcttcaaagagcagcggaaccggtaacgggtccggccggggggctgccccgggcaggggagggcggccgggactcccgcggcggccccggcctggacccaggcgccgcccccgcctcgctggagacgcggagggcgaggcctgcgcgggctgcctgagcgccacccaggcctcccgactcccaggcaccgcctcgtgctcgtgggtccccgcggggcctggggcgggcgccccgctcccccaccgcagccagtccgggtgcgaagccgcgatcccgggagcccttgccgcggcgtgccggtgatgttgacccaacacacggttaggcctcccctgtcatgtgcgagggctgcgccaggccctggctgcaagacccacgcggcccccagagtcataaagcgtgtgttttagcgggagagacccgtgttacggacgcgggaattgggcagttgcggggatggcagtctctaggcatggagtgggactggcactcctttctcctcggcgttagagcccaggctgcaccatctgccctgggggcagcgctctgtgcagtgtggaagagcacgggcctggagagaccagtccagtcctgatgccactgaggggcaagatagccaggcaaaaagagaaggtgcccaggagtcgacagttgtggatttggttcctggccttgcaagctgcgtgttactgtgcagtttctccaggccttagaattcttgtctaaaaatgggactataatacacagcttagttgctggattgtacagaggaataaatgaaataaagtacgtgaaaatataaaatgtgcgaagccctcagtcaatgcttgtttgatcttgttctgtcctctgggcctcagttttcttgtctatttaatgggagtaaagttgaacagtacctccctggtgatagtgtcataaggagtaaatgagatataatgcatattaaatccttaggacatacctgtacatagcactaaatgtagctgatattatcacttaacacattgattggtagttacccatgtatcagctattgtgctaggtgatggggtaggaaaatggaaagtccttgctctctcctgtactagtatgtacaagataacacagctgtgggggtatgtatgtacaaagcagagggaacattgaagaaagaaatactgagacttgggtcagcctaggtgatcactagaggacttcctctctttaaactagacacctggtctgagcacttcctttacctcacatcactttgggaaatgtggagctgctgaaggaatgctattaataaaagtccctggtactgctctatgggcctttgggggagatgtatttattgatttaatgcttaggcatttctgtatcatgatggaccctccttttagttaataacccagtcatcaaccatttattgagcacctactatgaaacagatttttttgttggggtctgagggtacagagaggaatgatgtgagtgatcccttttatcaggcatatttgg

SEQ ID NO: 70348 - DNA, 2125 bp, Homo sapiens
cgtgtgcctgtagtcccagctactcgggaggctgaggcagaagaattgcttgaacccaggaggcagaggttgcagtgagccaagattgcaccactgcaactccagcctgggcgacagagcaaaactccgtctcaaaaaaaagagtgttagtgagtattcttccattcttcttacggcaatgctgtcactaaaaaatggcttatgtacttgtttcatacagtttattgaggcaagattagtgctgtacccttgaattttcatttcttaatttggtcactcagttgccgagacactgagtcaaagtttcattatttacactcagggctgactgggggagacatagacaaattattttatgtgcagtttcccagtttttaattaatttatactctgcctctttcaaaaccaagtttgagataccttaaaaaataaatacgagaaaaagataaggggggaaattaggggtagtggaaaagccagatagaaaaagtaaggattcatgttgtttgggtcataaatttgactccagacttaagaaaggccccgacagagagaaaacataataaataatgtgagttctattgtctgttcgtaagataaaaacacacatcacttggtgtataagaagccatggtactgaagttcaaggaaagacgtgtttcctctgcccccggaaaaggggcttccataggtgtcttctgcggcaactgagcagctctgtaacctgggcagctcagtgtccagagttctgaatgaacatgtggctccctgctggtctggctcaatccaagggtgaaaggtagggcactgtgaatctacagcgagagcagaaggagaaaattcatatggtctgaatcatttggcatttatagaatctcttaaattgtccaatgtggcaactttccttctaacgttaaaagagatttgctgtttctttaggggatttatggaatgaggaagttggcttgcatttaggtgcaatgttgcacaaaaaattcttatctttagagctctggaatgatagccagtgcaggcagtactcctggcatgagaggcacgcagagactgagatgcccagagggtacaaccacaggttcatctttctccctgggcatacattcttggtggaagaacaggcacactttacattctccccctctcctttctctcccatctatgtagttgactgtagaagtttggtgtgtgtgttgtcagcctcactgtgtctacagagtagatagtatccttgtcctacaggaatattgtttcttataactgaacttagctacatattgggtgacagaggaccagaatatattctctgtctagaacattaaataaagatactctgttctgattcagggtagatccataagcatgagcagtcactggaactgggatttgggttgtcatgggtagtggaagtgctcaggccagagtgcttcacttggccttgtgtctctgccagttactggctgagtgatttgtgcaagttacttaccatctctacttcacttaccttatctgtaaatggagaggacagtgttggcctcataaggctgttgcagagactgagataatacatgagaagtgacaagaacagtgtctggtgcatagtaagtgctcaatatgtgtagatcttttatttggtgttgtaaattaaggagctaaagcagataaacgtagcgtacctccccacaatagtagataaaagcagttttctgaataggacatttggaaatcataatcttttttttctgattcgtgataattttatcctttttcagagaaacagcacccaggactatcttccaaagagttctggatatcctaaagaaatcttctcatgctgttgagcttgcctgcagagatccatcccaagtggaaaacctggcttccagtctgcagttaataacagaatgcttcaggtgtcttcgcaatgcttgcatagagtgttctgtgaaccagaattcaatcaggtagttacacacgtaccttggattctgtttctttgtatatgtgcatgctggttctgtcatttggtttatctgttagaagttgttttgggctgggtaaggtggctcatgcctgtaatcccagcattttgggaggctgaggcaggagg

SEQ ID NO: 70349 - DNA, 4306 bp, Homo sapiens
tcctgttttttaaaaaatctatttttccatatcttttgcacatagtagtcagtgtgtgattaggccacagattttctccagggagtaagccttgagcacctgtaatcccacttgcattcacaggtgaggtatgagctttttcaattttggcttcttgcagtgtaatcttttatcattctattgaaattatacctaattttgaaattatttctttttctgaatattcatttgtatttcaattaagatttacaaacaaacagaagttggtacatacaataatatgatgtgtttaacttagaaaacttccctttgtatgcaaatgtaacatgacaggatcaatcattagagtcaacttacttagagaaattttctgtagctgagttctgttttatttgttgagtaccttgggtctgtattttaatcatctgcagtttttttttagcagcttggaataaagggcaaaaggtcataaagggcaaaatataaaatctgtttaatataatataatatgatataatataatataatatataaatagctcaagttaaaggtattagagaccactagaaggaattcagaaaggaacaaaggatggatctagtagtggttaaatgatcacttctgcagtccaggtgcggaatactttgatttatgtgagaggaactctacatttggtaacaaacaatgagatcacagaatatccagaggcttctgacgaaattgttgtttttgctgttaaatataaactcatccctggaaattggagaaaacccactttctgccttttttcttccctacattttaggagataggtggcaaataatacaaaactacatggtcttagaattcatggtttcattatgttttcttttcttcctttgcttgtttcttagaaaagggcaaatgtgattccaataactttgggtttttttatttgagtatactagagacacaggaaagtgtaggcgagaaagtctttggcactacttggtttgaattattgggataatgtctttctaaaaatgtctgttcttttgtttgtaggtgtgaaagatgttttcatgctcttagataaccctagatgaatccagggattctattttgagttcatctaaatctgaaagtccagtaaatgtgcactggtaggttaggtcagtcagtgcagaattacacagtagaggaagaggtaggactgcctcgtgctgatcctgtgatgtgttggttgctttgtctgtgtaatctcattttcacattgctgccatcctgtgaattgtattttgctactatgtacctatgaaagttaagcagagtaaaccagtctgacaaaggtcacacaactagcatatagcagaggcagcattgcaagtgatgccaaactcgagggcctatcccatttttattaataccatgtcatgtgttatgaaaattaccgattttcagagaggaggtctgcatttcaaaggtgaggcatgaactcttttcagttttagcctcttttggtgtaaactttttctttttgagacagagtctcactctgttgcccaggctggagtgcagtggtgtgatcttgactcactgcaacctctgcctcccgggttcaagtgattctcccatctcagccccctgagtagccaggactacaggcgtgcgccaccacgcctggctaattttttgtatttttggtagagatggggtttcatcatgtcagccagcctggtcttgaactcctgacctcaggtgatctccccgcctgtctcccaaagtgctgggattacaggcatgagccaccgtgcccacctaaacttttattaatccattgaactttttacccagtttcactacaaaaatgaagttataactgggagcaaagcattcttttttgttagtatttgggttatctagttgatttattttgtattctctagggatgtgtcttgccttatgcatgtacattttattatcagcttaagtgtaacaatattaggaagataaacataattgtccatcctcttgcagtctgaatctgttgcccctcttctgttcgcgcacaacagccatgcattccactttcatggcacttagcgcatttaattgtccattagactgtgagctccctgtaaggcaggatttagtgttgtttgttattggatctttaacaagataatatctggcatgtgataagcattattttagtcatgattcttctgaatctaagtgactgaagtccacttcagatggtttatgcacataaagggatttattggcttatgcaactgaaaaattccagggtcattgggtgaaggcacggtgaatccagggctgaaagatgtcatcagtatctgtctcatctttgtctcatttttctcctgtgctggctttgttgtaaggcacatttcctgcttcctgtgttggctcctgttcttgcctactcagggttggcatggcccacggctggtcctcagaccactcttctccattattgctcattctctgggtgacctcatctcataccacagctttaaatacctcttctaaattgatgatttccacatttatgtttctggccttgatctcttgctgaagctctaggtttacatatacagcttcctattatgtgcttctaattggcatctgaaatgtatgaaggctgcgtccaaacttttgatttcccccacacataacacctcctgttactctaccaatgtttatccttcagtaactggtaccaccatttactcgtttgctgaggcctggaacctgagtcctgattttctttcactctcacccacttatactcattagccctatcttcaaaaggtgttccacattcacctacttcatgcctcctctgccatagacatctttcattgctactgccagaactttcttactcatctttctgtctctccttttgccctctgaatcatcacacagtagccagagtgaccttttaaaaattactgtagctgttgtcactccttgcttaaataaaccattcagtgccttcttattgcaacctagaagcaaatccaaagtacttgtcatgtcctggcgtctgactgaccacctcatcttatttcttactacttttactcctgctccttagttccatctggtcttactgtttttctttgaatactccaagtttgttctgtcctgaatctttacatccgctgtctttctgcatggaaccttcctttagatcttcccatggctagctcttttaggtctctgttcaaatatctatcatttcgactgagagaccttcccagcactttatgttcagtagtgtttcctgtaaacccgtatcgctttactctcttttattcatttgtttaatagcacttaccactatcgaacattatacaaatcttatttgctttcttgtttattgttggttgctagaatgtaggactagctccataaggccctggagtttgtcctggtcatcattctatccaaagcacctagaacatgtgttgacaaactatggcccatggtctgaatccggcccactgcttctttttataaataaagttttattggaacacagccaagcttgtttatctattgtctacggctgctttcatgtaacagtggcagagttgagtagttgtgacagagaccatttggcctgcaaagcttaaagtatttcctgtctggccctttatggaaaagtttgccaaccccatccattgaagggtttttggtagtagtatttgttgaataagtctggtgattggtggcatcgttgtccttcagtcacttcaggcttatctgaagcagataagcctggttctcctgaaccagataagactttggtgagagacccccaaagggtctgtatcgttgttctctagaactctatacaggcttcttcattttacatcagcaatctattcctgaaaatcagacattctgtgcaaaaaagtgactgagagcctacttccttcttaaaaatggggacattataaaatgttacatgtctacccaaaaccccagtcagtgtcttaaaatagaatcaaactaaaatactattcagcaataaaaaggaacaagtgttggtacaagccataacttgggaagatctcatggtaattatagcagagtgaaaaaaaaaagccaatgaatccccaaaggttaaataatgtatcattccatttacatgacattcttgaaatgacaaaattacagaaatggagaacggattagtggttgtcggggattgaggaaggatgctggagttataggcgggtgaacctgcaaaaggggtgccgaaccgttctggctctcacctgtgagaggg

SEQ ID NO: 70350 - DNA, 3077 bp, Homo sapiens
aatgaatattcttactcaataaagtgttcctctagtatattgattaatgtaatcttatcttctaagttggaagcctcaaggttatactcagcttctccactttaccttttcagttcatactggtcagtaaaccttatcagttatactatcccaaggtcttatgtatttattctcttttttgtcacagccctagtttaccctatggaatctttgactagattttgacaatagcctttgtcaaaaaattgtggtaaatcacacataatataaagtttactattgtaaccttttttttttttttggaaaaggtataagacagggtcttgctgtgtgttgcccaacctagagtgcagtggctgctctcaagtgtgatcgtagtgcactacagccccaagctcctggcctcaaacaatcctcccacctcagcctccccagttgctgggagtacgggtgtgggtcaccatgccagactaccattgtaaccattttttaatgtacggttcagggggtgtgaaggatgttcacattgctgtgcagtgaacctctggaactttttcatcttgtgtatcagaaactctgtacccattaacaataaactacaatgaggtaccacttgatacccattaggatggctactatcaacaaactgaaaagaggaagtttgggcaaggatatggagaaattggaacccttgtgcactgtttatttcctactggtgggaatgtaaatggtgcatctactgtcttaatctgttttctgctgccataacagagtcctggagagtgggtaatttataaagaaaagaaatttatttctaacagtctgaggctgggaagtccaagaacatggcactggcatttggtgagggctctcttgctgtgttatcccatggtgggaggtgagagggcaagtgagtgcatgtgagcattacagagacacagtccctgcccttactgtgagggtaataaccatgtgttgttatgtacaagaatgacagtgctgtgtaaattcttaagcttttttcttgtgctagttcttttcattgttgtcaaaattagttgacttcttcacccagaggctggtagtctattcatgcagattactcggtggggaaattttggatatagactcatcatcaattcacgtggcatgattcagcaaaaatgagagcctacatttacatacttgtctggtctcctttccaggtgaattggagtgaatattaacaaattggactagctgctcgtggtaaacagcttgtgtagttttcaggtttatgatctctgtgtacggcatagtagttaaggacagatgctagtgctgccgcttactactttggataggttaatgagaataatagtagctaccccatgaaattgttatgataactgattgaaatgtgtataaaactctcagtgcctggcatgtaatggtcacccccgtaaacgtgttgcagggaagaagataattgactttggcatcagaaagagttcaaataccacctcagtacctctgtaacccagggcaaataccttaatctataacctgagctattgctatttctgcttccatgctcttactactattactgcaactacaagtctaacaactactgctactatgctgatgaccttgccgttttctccaggtagcatcaccgttatgtatagaaggcaccatgtagcccttgtcatttaatcctcacagactctgtgaaataggtattattcttgacattttccaaattggagttctgaggcctgtagttccagctactcgggaggctaagccaggagaatcactttaacttgggaggtggaggttgcagtgagccaagattgcttcactgcactccagcctgggcaacagagcgagactctgtcacatgaaaaaacaaaacaaaacaaaacaaaacaggaatcgtaattttaaggcagactatgtaagtactgtatttaatcaggggagaattagaaatagaatgctaatgacagccagtgattgagagacaaaattatggcagcatggctctgtttggagaggtgtgtctggtgaactcagagcagcctgagtgatgatttctgggttaagggagcaagactttcacaccaatgtgtaataattctagacggctgtagcctctaacccctttagctgggtctttcctacttttgcatccttcacaccacagtgaataagtcaatgagtaactagcatttgtcagaccacttgtattcttttatattttcaaggaagagatagagggttgggtggagtgtctggtagggagacccgtataccagactaaagagcttttagactcattccttaacagtgggaaccattagaaggtttaaatggcagatgacttaatgtaagtaggatcatttaatgaaggatagtctattctgaggtgatagtcaaacttagtttgtacttttatattttaaagattcatttctgactttgactgcttctttcctttgaaatcactcagtacccacatcgttagctctctcatcttgtaaccatataataaagctgcattatacaggcggcatctgctgggccagggagaagttgagccagaggaggctggcctgtgtgtcattgtgtaaggaaggcagtgtgtgcttctactccctttagcacttgcagatctccctgcacctcatccgcttggacccccggagtctcctgttgctgctgaacaactttgatttccaccaccttggggcccacccttcctgtcctcacctcaggactgcccatttgggatctgcccctgattcaggatctgcactattgttcgttttttttcttcagttgtaatccatctgttttctttctcatttctccacatccctatctgtggataccttaacactcacaaatctgataaaattattttcttctatttcattacctattcaagaaatagtgaactaggtgccaaattccctgaagccagggatcctgacttcttatacttagcaataactgttacattatgtaatccaatttaaaaggaatatatttagagtacgcatttgggccacgtggaataggtggcctct

SEQ ID NO: 70351 - DNA, 1091 bp, Homo sapiens
taattctgtttatgtgatgagtcacatttacttgggtatgttgaaccatccctacatcctaagatgaaacccacttgattatggtgaattatctttttgctgtgccgatggattcagttttctagtattttgttgaggatttttgcatctgatgttcatcagggatattggtctgtggttttctttttttgttatgtcctttactgcttttggtatcagagtgatactggcttcatagagtgaattaggttagagttaggtaggattctctctttctcaaccttttggaatagtttcagtatgattggtgccaattctttgaatgtctggtggaatttggccatgtatccgtctggccctgggttttttgtttttttggcaatttttgttattgattcaatctcactggttgttactggtctgttcagacctcctatttctttctgattcaagctaggagggttgtacgtttccagagatttgttcatttcctctaaattttcttgtttgtttgcacaaaggtattcatagtgtccttaaatggtcttttgtatttctgtggtgccagccataatgtctccatttccgtttctatttgagctaatttgaattttctctcttcttggttaatctagctaatggtctatcgattttatttattttttcaaagaaccaacttttatattttgatcttttgtttcgatttcatttagttctgctctgatctttgttatttcttttcttttgctagctttgggtttggcttgttcttcttgagacagggtcgtgctgtgtcacctaggctggtgtgcagtggcacgatcactgcagccttgaccttcctgggctgaagtgatcctcccatctcagcctcccaagtagctgggactacaggcatgcaccaccatgcctgactaattttttaatattttgtagagacagtatttcaccgtgtcgcccgggctggtctcaaacttttgggctaagcaatcctcctgcctttgcctcccaaagtgttgggattacagttgtaagccaccacacctggcctagttggttctgtttctctagttctttgaggtatgatgtta

SEQ ID NO: 70352 - DNA, 2435 bp, Homo sapiens
taaccgtgctcaaggatgtaaaggagatacgcttcataagagtgaaaaggtgggatatctcagcagagaaatagaaactataaaaaagaaccaaatggaaatcctagaactgaaaaatacagtatctaaaataaaaaaaaaaaaataccgaatgtgcttaacctcaagaaagatcacagaggaaagagccagtacactttaagatacatcagtagaaatcatctagtctgaaaaacaaaagcggggagaaagattgaaaataaaacggccgctttaggatgctaaatgttagggtaatttgttatgtagccgttgatagctggaataattcctgtgagacatggcgcagaaccaaacgctagacaacttgcacttttagtatatgggcgcaccattttggcaatcctcatcttcaggagagtgagactactgattccccccttgggaaattactggactgatttttgcaaaagaaagttgatagcgaataaagcactttacctttttaatgaccaggactgcctttcttgagcacaaaagaggtggtttttcttgtgtttaactattcttttgttgctaatttggactggcctcttataggaacaaaatgcagtaacccttaaaaggcttgcgaaataactcactgaagtcaggatcagattgcaccataagtaaatatggagtgtgcccaagtgctgctgtgcagaggtcactggggcgcacaggaagtcgatggtgtgtcctgtcacttgtgcagttgctaatagcactgctgatttctcagcaaacagtttagagggtatgaaggagttcattctttgagtatcaactcaaatgccctctgtttctctcagtttcttacgtgtgtcaacaaaaggcctgaacctgaaagcattacctctgggatttttttcctccttccaaagaccgacacaacgccgaaatcttgttctggatgtgctagagtgttctttattcttgtagccaaatccttgttccagctgggtgttacagatatttgccttgctcattgttgcctcaagggatggaattcactcgcactcagatgactttggttatagttttgggaaaatggaatggatggttatgtagcaggtctttatcacgggaccagtaattctcagtgttttgtcttgatggattgtctcacttctaacccagctagggctttaagggaaatttggctctgtctctgctccaagactaaagatctgagttgggagggatttcgtatcatctagcctaatttgggttcctcctttgcccagaagacaaaagggactgatgatttattgtttagtgtttactatgtccttgcattgtgcttagtgaattacatatattatcaactttaatctttgcatcagccttgcaaagcaggttctggtaaccacattttaaggagaggccatccagttaggtgcagagcccagggtagaatttggatttgtttgcctattgagttcccaggcctgtgctcacttcctgccccatggtgagaacttgccaaaaggttggagaaaagggtttaaaatagacttcctgcaggacttcaggctggaggctggtcagtctgcgtctcctaggccagccaggccccttagactccctcctggttgaagttgggagctcttgggggtcctcttatccttgtttctgattcacccattcatcaaatacgaatgtttgctggcttggggatcctttgacgggtaattcaggcaaggtattaatatcttctgtggagcttccattctggcatcatctggggaccatgcttgcctctttgaatcagaatctcaaaactactcatgacacagattttcctaaaatctttgtgtactgcctgattcctctgaattttgagcaagactctttcaagcccaactgtgtctgtgttgtctgtgtaacttcatccattgcagtgagtatggtgcccacctgctggatggccctcttacacttgtgtggcactttccattttccagagctcttttcatctgctttagtttgttggagccttatgatacctctgtggaaagggctgaaaagatatttccaccatcattttctaaatgaagaaaccaaggccccgagaccaagtgtgatttaactcagctagcacttgctgagtgagaattgccgtgtgctgcatgctctggagaagacagtcgctttagtggtggaatgacacatgtccactaggagctgtagcaaaagtccgtgtggtgaggcctgtcagaaaggaacaggggggtgatgtgtcctctgggctggctgtgccaggagcatttctctctaaggacaggcactggactgccaggagcatggtatcaactggaaggatggtcatctttctttgagatacttgtctttgggcaagatttaagagaatcaaggtacgttgcctcaga

SEQ ID NO: 70353 - DNA, 842 bp, Homo sapiens
aaacagcttttcagagctgctttgttttctctgctgctgccatggtttacccatccctttctggtattgttgctctctcaagtcatgtcttgtggtactttcgggaggctactaaatggagtggagttttaagtaatgtgcactcaagtacattagagataaattcacttcttgattcatattttctcctgcttctgcttaaaaatggggatctttcatctagctctttaaatacttcactggccagcttttgacattttgcctaattaaactgtcttaaagaaatgacagtaatggaaaactaacactgtgcttctactttttttcttatgattcagctagtttaaagttctttataaagaatgcaacaaaaatgccctaagtagaagtacaaataaaagatgatattaaattctcgcattttattgagcactttctagaagccaggtattgtgtaagacgttctgttttcttaccgtttactagaatgacaccttctgtttgcagtagagctttttggcctgtttttcatgaggccagaatgactcacctaagttcacatggctgagcaggtggcagcgccaggcttaactcagtgctcctgggtcctgtccctgccttcttgccattacctcttgttctgtggaagtctgaggaagccgcgaggctgagagtcagagacagtcctgtgcaaaggggtctgcaccgtcctgcaggaggggtatacttggcagcctctgagccacgtcctcctggaccaaacgtgggaagatattttgcattccaaatcagttgaaaatacctttctgacatctagctctaaggtttctggttgttttgga

SEQ ID NO: 70354 - DNA, 1693 bp, Homo sapiens
tgtaatacagaaagtgataatgtatcatgaacctatgatggtttatctcagccgtgcactgttggtttgatgttagaaaagcagacactttaattctcccatattaacagaataagagggaggaaacaatatgattatctcaatagaggaaaagcattcggaacaaaatttacactcattcacgtcaaaatttgccacaaactaacagtataaaggaactttctcatcctgaaaaaggcatctatgaaaaaaaaattcaacagctagtttcatactttatgatgaaacactgctctctctctgacatcaggaacaaggcaagaatttctgctctcaccactccagtaaacaacgtgctgaaggtccagagcaactcactaagccaagaaaaatcagatgcatgcaggttggaaagaagtaaaactggctttattcataaatgaggtgatcgtgtgtgttaaggaactgataaagttatgagaagtgaattttgaatggttacaagatatgtaaatgaaaattaattatataaaactagcaaataataataagaaaaaatttaaatgccacatacaatagcatcataaaacatgaaatatttaggaataaactttaacgaaatatgtgcaagacctatactctgaaaaccataaaacattgctgagagaagttaaaatttaacagacagctcaatattgttaagtgttagatctccccaagttgacctctatagagtgaatgctataccagtcagaatgccaggagacatttgtgttttgttttttgtttttcttttgagacagagtttcactcttgttactcaggctggtgtgatctcagctcactgcaacccccgcctcccgggttcaagagattctcctgcctcagcctcccgagtagttgggattacaggcgcctgccaccacgcccgtcccaggaaacattttttataaaaattgatgagctggttttaaaatttgaaaatgcaaaagacctagaatagctgttatgggttgaattgtatcccccaaaattcatatgttgaattgctaaaccccaataccttacaacgtgaccttatttggaaacagtgtcattgccaatgtaattacttaagacgagatcatactggaggaggatgggcccctaatccagtatgagtggtgtccttataaaaaggggaaattgggcacagatgacacacagaatgagaatgtcatgtgaaaatacagacagagatctaaaaaccaaggacaccaaagtttgccagcaaactatcagtagctaaagagagacctagaacaaattctccttcatagtcctcagaaagaaccacccttgccaacatcttgatcttggacttctaccatccagaagtgtaaaacaataaattcctgtcttttataccatttggtttgtggtactttgttaaggcagccctaccaaactaatacaattgccaaaacaattttgaaaacaaaacaaagaggattatattacttctttcatgacttactataaagctaattaagatagtatggtatttatgtaaatatagatgtatataccagtggaacagaatagagtccagactcagtggagaaaagatatatttttcaacaatggcactggaatgattttatatccttatggagtaaaaaagaacctagactcttaatttataccaaacaaa

SEQ ID NO: 70355 - DNA, 1266 bp, Homo sapiens
ttggcaggtagtcaaactgttttaaaatgagactgtacaagtaaatattccaagttgtgctccttcaggttttgtctactcagcttttggttttgtgcctctcattttcttacacctccagaatcacagaggctagaagctaaagctgtgtcagcacactgggagttttacagtgtacggattggcagacagcctggcttctttccagggcattaacagttatgcacttgtgtgtctttagagccatggtcactgcgtccctctctctgcctcaggcctctgtgttcctgcaggccagtgccttgcgtttgtcctgccaagcctggttgctcagctctccctggctctcaggagtcaaagcgcatctggttctgcttgtctggtttacctgtgttaaaagcaagactctgcatgcttattctcacatcagtcagaagacgccagcctgttgtttttcagagcgaggttctcagtgtgagccatgtgggcggtcctttttggtttgaaggtgaccaccctcgctttcagcggaccggggcagggatcagggatcaacagcctggggcagggatcagggatcagggggcagggatcatcacgcaggaagctgtgtgaaagaggtgtgggaagctgcttccctggacttgctctcggttacttcagctgcctgtctgctgcgttttcccaagcgtgcttctcagtggttgctgttaatgttctaagggccaccatgtaacatttatttgaaaacagaaacaaaactgtatgtggacactgattgcctgttcctaaggacctgctccttagagccaagccccgtgactgatgcaggctgatggcagcatcctggggcctgaccttggtgcactgtgtctctggcttctttgcatgcctaaaacttgcgtagtctgacacgtagggaaaacatgagaaatccatgcctaaataatttcaccttaatcgtcactattctagaccagttgtaagcttactagcttaagaaagtattttaaatttagaagctacatgcaatacttgtttttcaaaattgtttactcaaacagtacatttaacagagtagccatcctgcattcctcctggtttctctgtagtatgaagaatagaatagaaaatagaatagaatagaatagaatagaatagaatagaatagaatagaatagaatagaataggcttttataattcttaactttgtattttagaaattttgtatctgatgtataagatcagatcataagcctaaagta

SEQ ID NO: 70356 - DNA, 716 bp, Homo sapiens
ggtgaccatgcagcagccgcaaagcacttggcggtctcttctggctcgaggctgacgcccacgcgagcccccacctagaacctccccaacctgtgtccaccgggtgtgcccccagaaatcttctccaggaagacttcctgaacagccctctgctcctgtgacggctctgggccctttcacatttgcctccctgcattgcactgagctaacccagggctggggcgaaagcgcttattgattcaaccttcagcaaacactgagcactaactatgcacttgtattagtcagctcaggctgccgtcacaaaataccactgactggtgactaggcaatagaaatgaattttctcacagtctgggtgctggaagtcccaggtccaggtgtcgacagggctggtttcttccggggcctgtctccttggcttgcgacctcctcacttggttgtccttctgtgcccctggggtctccttgtgtgtccacatccccttttcttacaaggacaccagtcaggttgggttagggtccaccctaatgccccattttaatttaatgacctctgtaaaggtcctgtctgcaaatgtagtcacattctgaggtcctgtaacgcatgaattgtagggggtgggtgggggacaccattcagcccacgacagtagtaaacatgcccaggcgtcataggacaggcccagtccctactctcaccggagctagcccgg

SEQ ID NO: 70357 - DNA, 1376 bp, Homo sapiens
tctcttgtgtgtgggaggggtgaagattcaatgaaatatcacaagtgacactctcacccagggctcccagagagggtggccccagccctacgacacccatggccccaggggagctcatgactttgagggtgtcggtgaccctgggggtgccctggctctggactgggccaccatgtgtcactgcagccaccagggggcagcagaggggagctgttctgctttcaggagctggtgcctgtgcttcctgcaaggaggggggacaagaaggcccccggggtcactcgaggccagcagaggagtccagactccgatcccagctccactgctgcctcccgcacgcctggagccagcccggccctcatctgtgcacgcagggtgtgctgcaccccaccaggcatctccaactcggagattcagctgcagccctggccgtcagacccacgggccctgaagtccagggggccctctcgcccgcctcctgtctgcagatggggaaattgaggcccagccagggcaggggatttgccgacgtttcgcaacaaattcgagtcagaaataggcccagctgggcctgccggcgcggaggcccgctcgggacactgctggccaacgcagggcccagcacggtcccagtcacacccacagcagggtcctgccagccttctccgctctcccctgggggaagtgaccctcctccacctcccagagcccacgtgagtccgcaggaggcccccctgggccaggtgccaggtgccgagtggctgcctccaactcgggggctgctatgcaaggatgtttccagttctccgggtccttccttccacctgggaggtccggggctgccgggccatgctggtccctgtggccctagggcccgcccagcgcagggcctggcagggagagggggaaacgtgggtgagggaagtgagtcaccccttgggacacttccctgctcagttcctgcctctcagcagcttctgcgaggcaggtcacacctgcaggggagcctggcagcgctaggagaggcaaggggtgggggtgccgccttttcatggggccaagaggggccctgagagggacaccgggtggacagccccaggggcctccttgctcggccagccggcatctccccctgctcccagcataggagggccggtggcctgagtgctctgctccgtgcccggaaaagactcatgttccaggaaaaagccgcttggcaggtcggagcaagctcatggtgctgttcccagacccgatgcgatgcgtgtggagggaggcctgcccttgcccccagggctgcagggcgagaacagaccttgattcctgctataaccctgggcacggcctctgtttctccgcgtgtgcccgggggcggc

SEQ ID NO: 70358 - DNA, 2753 bp, Homo sapiens
gaagggaaggacacaggcgtaggcaggggcagcaattggaccctgtgcgtacctgaccctatgcgagctctgcagctcaaagggaccagagctggcctgagttgggcagaatgggctggaccttatgctctggatcgatggggctgacccacggaagccaggaccttcgggccaaccctgaagggaccacggctgaggactgtgtgccctggagggagttctgagatggggggtgtaggggtggggaacccacaggcaggcactgcctcagggcctccctcctgtcccatggcccccaggtgtcctgcggccccacactcagcctccttctgggggtctgggtggctgcaccttccatggtgccagccaggccttgtgcccatctccacccccttgccctcacctgccccaacccaccacgccttggcggcctcctctcggggcttcctggcctccaccaagctgcacccacctccgccctcatcacccaggaggccttccccggcctggcccgacgcaggctccacagtctctcaccagcctcccagctgctggcagtgaaattcacaggagctccctctggggcaagggtgcctccgcctcctccatggcagcgtccccagccctgcacggggcccccagtgaacacatgggctgaataaatgagtgagggcatgagggacgcctgaacacacgaatgagagaatggcactgggggtccgtgaacagcttgttgcattgaagatggtgaaggattttcatcctggtccaagcatggaggcctctctagaaaccgtcccttccagctccatgaggggtgaactctgagctcagaggccatggggccaagtgcagaaaatggctttgaactctggaggaaggaaagaagccaccctccaggaaggagtaagaaccgctctggaacattcccaggaaaggtcgctggggggcagacctgagaggttccccggactcggcggacccagatcccccgcagggcagcccctggtgagtcagggcctgagtcagcgccctccgccttcccagaggccccgccaggacctgcagccctgggcgccccagcagcccggccctgctcagcgcagctctgggttggaacttgcactttccagtaactcggacctccccccggccgccttcccaggcgccaccgggcccagcagatcgtcaccgtccaggtgcagggtgggggtgtgtgaaagtcaggcctgggacccgggcaagttgctgccgtgccctctggcttcccgggggacatccttcacctttgtgcgcccaaaccctctgtgctgcggttccaacccccctccacattcccgcctgctcctccgggcctgcccgttccctctgccttcctgggaacctccctctatctccgcatcttccgccgctcccttccctgcggcagccggcgggctccgactctcgctcttcagggaacaccgcccttggcgccacgcccacctccacccgcggccaccttccctccctcccaccgccagaccttcaagacaggatctaccccgggcggcccccagcacaggtctcagccccctccagactggggttgtcgccaccctccactgaaatggcggcagccagctccctcctgccgcagccggtggcagccagctccaggcctggccggccccgcccaccctgtgtctcgagtggcacccacggcgctgtccctgtcccgcctgtcttctcgtgacctcatccggctccagactctcacatgtttacgccttcagccctgcccagccctggaccccaagtcccctccaatatttctttttcctttcttgtatttttatttatttatttatttatttattgagacagtttcgctcttgtcgcccaggctggagtgcagtggcgcgatctcggctcaccgcaacctccgtctccccggttcaagcgattctcctgcctcagcctcccaagtagctgggattacaggcgtgtgccaccacgcccggcgaatgttgtattttcagtagagacggggtttcagcatgttggtcaagctggtctctaactcttgatctcaagtgaaccaccagcctcagcctcccaaagtgctgggattacaggcgtgagccaccgcgcacggctatcccttccaatatttccgaggccagctgcccagagaaggagggctgggtggagaggaccgtgccagcagcagtaggcctgggccaggagacaggcacgcacctccgcggtctctggcgagtctatgtccacacagcggcaggacctccacccccagccacctgcagcagccccacatctccaccgggtcaccctgctgacatcaagagtgcctcccgcaatgtcccaacccatgagggcttcttggagctgaaccagggcaccggccacttctggaggggggctgctcgtgacttccgacctctgtctcgctagttggcatgagaagactggactccttctgcaggcctcagggcagaggcagatgtcagcccccagggatgtcactgccagaaccccagatgccccaagccatctggactccccctgtgcagtatctctgctacaataaaatgtacccagatctgagtcctctcacctgggcgactgccaatgtcccctgcggccctataccccgcccccaggagcccagaggatctttctttttaaagatattcagacctcacagataagtctgccctgaccagcccctccccagttcccaggccctatcc

SEQ ID NO: 70359 - DNA, 1500 bp, Homo sapiens
cacatccacttacggccccggaagaccctgttgacaagctgttgtccctgtgaccgggaaacccagtggcagggactgtggcacagcacagaacagtaccatgcagtttttaaaagggacattggtaagaggttgatgacaaatgttattttccaggaaaaagtcaagacgctgaattgaaagttcaccctgggctgtgaggaagaatttgccccaaggggagagaggaggcgagggagttcctctccacgcagcagagctctccctgggttgggacagtcattgggggcagcctttatttccttactgatcatttacaggatctttaaaaatcaacctaataaaagaaaaataagaagggcaggaaggagggagaagcagtcacctccaagggcctaagatcttttggacctggtcgcaaagggactctctctccaggagggtcgccagggccgcagggtccgggaccaggcccagggtccagctaagcccgggccaacacggggacacatgcgcacacccggacacacccgcacgcacccgcacacgcacgcgcccgtgggccgcgccccgccgcgccgggggcccgcattgacattctgcgcagttcccagcccgcggcgccgcgtggggacagtggcgcattgttccccggacacgccgggcggcgcagcgccctcggggcttggcgcggccccgccgcgatttgcatgcgctccagtcacaaaggttcaaggtcaggagcgccgggcggggctggtcttcgccccggcggcgggaattcctcgccgcccgcgcccgggacgcccctgcgcgtgaatggccgagcgccgccaccgtctgaggtgctttgtgtctcgccccggccagctgggcccgcgagggacgtgccagctcggccggcggcgtccccgcgccagcgcccctcgcccatgctaatcagcctggcagcgcgtctgggcgggcggcccggcccggcctgggagcccctcacgttccctgccgggagccccctcctaccaggccccctcccccagcttcccctgccgccaggagaccccacttactctgccaggagctccccacgaccctagctgccaggtgcctccacccgattccacctccactcctcctgccagaagaccccctctccggctgccgtgggtgccttctgcccagccagaagggcgggtgcaccttgcaggaatggctggctggggagcctggggcgtaggacccttctgggactctgacaggactctctgtggggcctggggcatcttctctcagcctcgatttcccctgaacaatgaggcaggttgcccttcatgatctccagaggcacttccagagctggggtctcccagcaggtgcagggaaggtagtggtaaagatggcattcccccagctcccgcctgctctgccattatccagcctgctggcctggggacagtcaccctgagccctgagtctgggtcaccgtctccagagatgccttga

SEQ ID NO: 70360 - DNA, 458 bp, Homo sapiens
gcatgtcacacccacacctgagaaaagggcccagtcctgacagcaccagcaaccaagcagttaaaagtattccgtggcttccagggtcacagagtggagccttccccagagtccagagcctggatccagggtcattgtccctgcagagctcagagcccagattctccctgccccacctcactgtctttgggattgattgctcagcaaagacaaaaaggcagcgatcctccatggaccaaagcctctgagccagggcccatcccccaacagtggggttcctgctataacaggtctcctgccaggtaggataagacacctctgtgtaaaaaacatgtccacacacactcccgcgatgttggtgcaaaaacaatctgttcgcccttcctagagtactgactggtaataccatattcaaaagcctttaaaaaagcaaatcctcagtgaagttacaattattc

SEQ ID NO: 70361 - DNA, 1600 bp, Homo sapiens
agctcggaatcagccccacggcccgcggccgcaatgaggccccgcccaggccccgccccagccccgccaggccccgccccacagccgcctgccgagcctttccctgagctttctgagcgggccgcgcagaggccccgcccaggccccgcccaagccccgccctctcgactgtgacgcaacatccgcacagcccgcggcctggaatctaagagactgccacccagaggccccgcccctggcgcgtagaggcccggcgatagacttggccccgccccctcagctgcggcgctacgtccgcaccgcccgcctcaccctcgctggggcttccggaacaggtcgcgccgaggccccgccccccggctgcaccaggccccgcccctttggctacggcactgcgaccgcgccgcgcgtcgcgccctcgtcctgacttccggggcgggacggaagagcgggcgggaccgtccagtccaaggcgccgcggcttccgcccgggaggcgggctggtcccaaacgaggtcgtgcgcgcttcctgcgatggttttttgctgtccccgtctggccccaggtgcgcgggacgtagaggccggacagccgggaggcggagatgaaaggggccagcggcccggccccggggacacgcgtgccaggccctgctgcagcccccgagaggtcggaggcgcggagccagggctgaccctgtgcactgggtcgagggccacccctcgtctcagcctaagctggacgcaccacccgggcagaagtgacatcagaaccctaggctccgttgtcaaccacggttactgatgtcaccccttctgcacagggaggaaggtgtggcccagcgaggcatcctcccgtcttagtcggggtctgccctgggtgggagggattgtaggaccccctctccgctggctgtgacagcctaagctggtgagctgtttctagccagagtgccccttcggtgaagtctaaagccccgagatgtcaacggcagctgccgtgtattgaaaagcatgtgccaggccatcctggacttagacgtaaatgtgttatctcagtactcctggcagctgtataaacgtgcatgccaccccttttcacagatgaggggccgaggtcagagaagcagcttgccagaggccctggagggcaaagggacacagcctagatttggacccagatccttgatactgaatctcagctgttagcctgtgtgctgagccggcatcctgtgataatagtttcccttcagtaggtgtagctggctggcagctctgttgattaccttagctcactgctgcctcctcgagttggaagacccgcttacccagagctaagcccctctcccaactctgaaggtgctcagcatccctcagcttgacccaggttgcctggagattcccacccactggttaccccagatctcccaatactctgcctccctttgcttggggtgggaaaggatgccctctgcccaggatctgaatggccggtgtgtggcgccaagcctgctgggcctgtggtgccagggctacaagtgcacaacagaacacccccagtgtgctcacacagtgtcaagccagcccccagggtgccgagg

SEQ ID NO: 70362 - DNA, 2147 bp, Homo sapiens
ctggaagtttccagggggagtggacagtaccctcaggggctcttggggctgagacctcttccatgaatcacgtatggaagcccaggaccaacctcagagaggatcatgtctgagaagtcgtttgaggggaaaaatatccacttaagagagaggttctccagccctttggagcatcacacacgtttgtgggacaaaagacaaatattcctcccaccccaatccccaaccaggctccttgttcatttttctttaaaaaacaacaacaaaaaaaaaatccgcattctccccagcctgaaatagtgctctggaggagctggcctggcccggagtgtcttctccgtaaacacacctggtgaggaagaacaggaaggacggacaaagggaggcctcaggcccagctggcagccagatctgtgcctcccagcgcctccagggcccttgcagtctcgagagatgtggcttggccacttttgcagattcccaggcctggggccactcagttgcctcccccagcccaggtgtctcctcgggacccttgcctgggagggtttgaagccaggcagggaaaagagggcagaaaatggtggtgccggggagctgggccgggccagcaaatcattccgcaaggtggagaactgcaggctgagggcaccgtgggcctgggcccgggacccagcatggaaccccttctcctggagcaccaggggtcacaacagtccctccactccagggatcacgggtgacccacggccgggtgctttggggacgagacaaagacagcgtgttcctcaagcccctgcctaccgctccgtcactggggccatggtctgcgtgccaacaaccttttaggaagcatcttgtgcccaacctcaccaccccgcaaaaaaacctgtgtccaaaacacttggcagtggggcttaaaacgctcaggtgccccgaggaggcgccgggagatgagcccagagcggtggctggcgaaggccccagcaggactggggcgtggaacttgcttgtttacctaagagaaaaacacgacgaaaaaagcttctgggtagaattggaagttctggggctctcggcgccgcggcctccgcgcggttctcttcctcccctccccggcctgcttttcctccttctttccctctttgttgccaacctcggagccgcgactgaaacccagcccagcgtgtccgcgaagcccggaaacttccagctccgcgactgtgcagaaagttggggggcgcggccggggtgacagcagcgcttcgggggcggccgcggcggccacccggacctcggcctcccgcgcctcccgctgccccagccgcgcccggggacctcgggcagcccgcgggccggacgtgaacttgaccctgcgctgtgcccgcctggaccgcggcgcgctcgggacgatctggtaagcgctccccctcccgccctcgcccggcggcgctggggtccgggtcggggtccgggctcgactgcgagggcgtgtcccggggtggcgggcgccggggctcctcggccgctgcaccggagcgcacggccgagcccgcggcccggcccccggcgaagtcagcccccagcctcccaaacaaagactcgcaaagttcggaagagaatctttcccgacattttccctcccctcgggctctgcgctgcggccatcagggctcttaaaagagaaccgagagctctctggttttctcctggtgttttcttccctgcgctttgccccccacctttggctggagggaaggaggagggggcatggatgcccctcgggccctcaggtgttgaccctccgaggccaggctgcccaggggcagcacaggaggtgagggcctgtgggatgagggacccccgacagcacaaggaggcaagcccctcgccgctgcaatgctccggtcctggggctcaggtggaagttgctcctgatccccccacacccccagcaccatcctgagtgacttcccttgaccgtcctgggtgaccatcctgagcaagactccctggccaccaactgtcctgtcggctctgcttggggcaaccacagtgccaagtgagcctggcaggtgctgggtcacaggacagccatggacagggcctggggaggaggagaagctggggccctgtagagcctgttc

SEQ ID NO: 70363 - DNA, 2468 bp, Homo sapiens
atatcattcccattttgcaaccaggcagaccgaggcccagagaggccagataacctgcctcaggccacacaaatggcaaacaataaggccaaaccttggtgatggccagactctaaatccggggccacttcttgccttaggaatatagtctttcctggcactcacttagccaaaaatctttctagaagggtggcaggccttcctgccccactcccggaacaggccggctgctttcagggccagaagagccagccctttggaggaggaggcttgtgagagtggggatgggccgcagagcctccccaggcagggcagcgttgcagcttgcatgtggcagggatgtagggtgaagctgtgcagggcaaaagacaggtcagttcccgctggaagtgccccactggggggcctcggtgtgtctctttccccagcactggcatggcacattttgacctgagcaatggtgagctgcccggaatacgaacaggaggaagagaaccttccccaggcagcatgtgaggctggggtggcactcgacacaggacagcaggcaaggacatgccgccctccaggctgagggtcttgggagcctcccctcccagcccctgctgtggcctccccctgggccctggcatgggaggagttaagctgccgcgggcaccttggcacattgcgctgcccagagtgtccggctccccacccccactgcttttcttcctttttgcctttttccttcttaattaatcatacgctgctgcccaatttaaatatggaaatgcccaggccgaggcgatgcaattattcatgagggccgggcggctgtccggggctctcgggctgtggggagtaccgtggcatcgcctccgttctgatgtgtgtgaaattatgtgcacaaaaggcgcctccttatctgggagtgtgaactaaataaataaataagggcttttgtttgtttgccggctcctgcacatggctgctgggactcaagcgctcgtgttgtctgcgcctctgtgggactctggggacgggaggcaggggaggcccccgcaggccggccaggggctgggggctgggggccgggggccggccgccgggcacctggggccctctccctccccaggcaccaccctcaccccgcagctcccccccatacacaccctcgctggaaagttcgccctgcccgggctgggctcccaggcagcctggcaccgtgccaggctcgccgccgagctcgggcagcagggtggggcaaacgcggagcacggaggacggggccgggcgacctgggcaccagcaggacccgaggccaggagccaggggcccagaaggtgagggcaccccgggtgggcgcagggtgggcgctctgtgggcaacgggccctgcggccgggcccaggagcaggcctcgttgcggggttggggggggaggttggagcggaggctggcagaggaggcaggcacaaaggagggcagtgccaggcagctgtggccgacgcaggcatcgctgcccgcctgcccctagccggcctccccgccgaggggaggacgcgtgtgcaggggcccgggcaggagcggcagacaccgagccgcggccacagggccagccgcacagtcggaggaagggccggagcgaggcggggcccggggctgtcaaggagaaaaacatcccaaggcctgcaaattgctgctctcagcttttttcccccctcctcctgcttcgcggggtgggggggttggggggggggtggtggggggagaaagcagcgcttcctctggaggcggatgcaaaaaggatgcagaattttaaccatctcctgcaccggcccgtccttcctgagcagggtttgggcccaggcctggcgccgtggctccctgggaagggaaaggccagagcagccgatgccggttctgggggacgccggaaagcccagcctcctctgcacctccatccagaaccgggggccccgcagcacctgcagcaggggtggagggtgggaggcagaaggggcctggtgctctcggaggctgcacctcacggtaccagtcgctacccagagcagcacgcctgtttgctggcctgctcttgggtgttaaacatggtgtccaggtccccggttggagaccccagccctgtaccgggtgagggtcttagctcccactgacttggggccttcaaccacactggcatcccaggccttcctcctgactgacttctgttttaaaaataatgtggaacgttttctggcatctggtgagggattcacacactgtttactgagggcaggacttaaggaatgagttcagaaggtatctatctggtcactggacaaacggcaggcaagccccctgtgctcctcgctgggtgagactcaggggcatgggtttgggcatgggagctcagagggatggtctgggcccacaagcccacgaggcatagagcctagggcccatgaaatgttttcattttaattt

SEQ ID NO: 70364 - DNA, 6721 bp, Homo sapiens
taacttattacagtgagagcaagaaaaaaaaatcatttaataaaaagaaggttagcaagccagtatgattatacaatgatttcaggtgaaaattacaaagctaatatcctggcatttagtcactgcgttcagtaatgatacagttgtcaaatttgtatttgtgccaatggaacaaaacttgtaagtggcataatagaagataatctctttttctttgtggctttttaaattcaatgttttaatccatttaatcacaaaacatatatcacattagttataatatttatagtgtttaggaacgtgattataaatacagtgtggttgttgggtgtagcctttttttttccttttttcgcttgaacgtgtatctccgaggtatgcatcatttctagagattgcccttgagaatagttttattgagaatagtaaccatatatttatgttcagaatccccatttggtcgttaccggctgtgttcattattttggaaaaacaagattccatattaaaaggcctggtgcttatgatgtttagatctctgcattcatctcagtttctaaagcatttttgttcttctggagtccctaaacttgctaaaccacaaaatatctgtagtatgttttttaaagtagttgaaccatacagcaacgatggggtacaggaggagtttatagagcagttagcggttgagttctgccttagtgtggctgggttaggaggggctacaggggcatatgtgggactttgggcactgctgggcacagactcatcctgtgggaatgtgtgctctcaccccacacttcctatttggggctgaaaattttaatagtgaagaaagaaaatgataaagcactgtgctagacaggattgatttcccctgctgtattgctagaaggtagacacggcatgtctgcgtctcaggctgccgagagagccgtgcccttttctggggaagcacagagctcctgagcttccagctctgggccccacagcccttggagctggggggtgagggggagacacaggaccttcctcaggaaaagagggcaccccactcgatagtgaagccaccaggcagctatggaaagtgaaagttggtccggattccaatgaaaagattaattggaaaacatttctactccattttctaaaactgagttttcccatagaaaaaaaaataataaagctatccctaaagttctttcagcttctaaaaagaagatgctgtagtaagattccagtccccaccgccccaactcccaggaaagcaattgggaaggtttcttaacataccctgagttcttccttccctccccccaaattccgtgtgtcatggggtggaggcagtggtgtgtttatcagggtggctggcacaattcacagccacaatcatgggggtctagcgagctgtggaaggcagctcagtgggcagcgaggccctggcagagttgcccggctgccccagcccagcgttgccctcctgggcagtctaatccaatgtgaaatgaagtttcctgggaagcagggcacacgaggaacttttgaatttaccaatggcataaaaagtatatatatttttatgacaacgggcaagtttcaattggttggcagaaatggcgagatgtgacgtcaagggacactggttagaatgccaaggccggcggcggggggttggggggagacaggcacagacagacattgggttgggacccgggaggccttgtttctctcgggccctggccgccaaagggccgtcgcaggcgtctggggacatcagctccatgcggctctgggccagggcatgctcgggcagggggacggggtctgcgaatagtgactctgtgtccgcgtgcgtccccgagagccggaggcccaggccggcccctctgcggtttgggaaccactcaggcgcctctgtggagcgggcgggaaaagacgccgcggcctccttggcattctaacccgtgtccggaccctagaggccggccggtctcaaccaccgggagggcctgggagggaaccgtgtggcccggggccagcagtgtcgccatcgggctccgagagagcaaagctgtggccttgaacttctccccgaagctcctgtgccctgagtcggggaagcaggaagttgttgccaccgggaaggaagagagcgcgctcggagctgggcagcggctccaggcaccgcgcccctgcccatcccacgcctccccgggcaccgtgaaccaccccccaacccaactcctccaggcaccttgcgcgcccctcttacatctcccggcactgtgcgctgacccctgcctccgccggccggctcccgtgtgccgagtccggactcccacccctctgggcaccccttgctccgcggggccggcggtgtcctggaagccgccgcggggttgcccgtgcgcgcgctccgccctgggggaagcccgctgccaccgtcggccccgagcgctgtcccggggccgcgtcgagagctccgcagcgcacactgttccccgcggggacgagcctggagagcctgaccgctgtccgcggcgcgctcggggctgcgggcaccaggttgcggggactgcagggaccgtcggtcagccaggggtcccagagccgggcccgagcgtgcgcgcgcgtcccgctgcccgcaatcatggcagccggcgccttggagcgcagccgccgagcgcgccccagcagccgcctcggtgccagggcggcgggggcgggccgggccgggagctcgcgcccgcccgcccgcctcggccgcgcgggccccggggcgcgaaacggaaggccgctgggtctccgcgacgcggtgcccttgcccggggcgggcggcgggaggggccgcggggcgggggcgcgctggaggggagcgcccggggcggcgtgcccgcggggacgcgcacgcggggctgcggggcgaggcgcggggcccgggcggcgaatccgctgctcgcaccgcccgccccgcccgcgcgcgccgtcccggggtggggggcggtggaagggggaacccaggaggggcggcgcccggtcttcacccgcagcgggcacggcgggggccgcggggggcctcgttggtattccgggcgcggttgcatccgcgacctccccgcagaacaggggtgcccgggcgcgcgggcaccgccgccgctctcgggcggtctccgcgggctgcggggcccgcaggcgccttgctttccccgtcccctcctccctgggttccccgtactccctcccccgctccgatccggcggcgaaggggtgggcagggaaacgcgctctctgggacaggtgccaactccgagacaaaagacataaaataggcggcaacgggggaagcgcggccggcgcgctcgggcggggacggcggcgccgcgggggccgcatcctcggtgccgacccgggaaagtttgggaagtcgccgcagcggcttcgcagcggcgggggacgcgcggcccgggtcgccctccgcgccgcgctcgccctctccgcgccgctgctgaataattcatggcgcggccgccggccattagcatgcaccgggcgcgcggcgcgtctgtgccaagccgccgccgcattcggcgcccgggcagcgccagacgagcggccgcgcggcggccgggcccacgctgtccccgcgcccgcccgtccggcggcgcccattgtgccccggcccgccccgccgggctgtccccaagcccgcctgcaacccaccgcccgcccgacggcccggccctgcaagtcctggctcgcgacgcccgccccggaatgcacgtgaacttggagaaagtcgcggggcgcgccggccgggctctccgcggcagggcgtgggcgtcccggggccggcgcgctttcgttttcgtctgggacaaaggtcccttgcggcgcgcggacgccgtgaccgggtcctgcgggccactctgtggcgcagtcgggtcgctaagcgcagggaagccggagcccgaaggcaaggagagacgcggcgcggggccggggaagtggggcctgggccgtgcgcttcgcccgcggcagtccagagccgtcccaccctgcgaagagttgcgggaactggcaccgctctgccgtccgccgcttcgacgcgggaagagggtgagcgtttggaacccaggactcagaccgctagctgagggcctgtgcagctctgggcacgcgagcgcggcgccggcggcggccaggcacggtcctcccgcaagggcagggctgtcgacctgtgcgccccaggtcacgatcgggttcacggcgactcctgaggacggtaagtgcatttctcactttcgctgcttagtgagtatttaaatattaatgaagggatctctaagagggacccttccgtagggcaggccttccacagaccagggaacgcaccgaggaggttgctcttgaacctgaagccgcaccagcttgcaagaactccactcggcattaatctggatcttggaatttgtgaagcacagcttctaatctcaggtgtgcaggctatttgccagagagaatcttgttgaacacataaaataagcgttagcagacatcttaaacacaatgggaagaaaagaaaaaacatctgtttttagatttttttttttttttttttttttggtgagatgtgtttggaaaggttattgggaagctacaactctttcttggaagattgaaatatttcatttacttcctaaacccacgctgctgattttttccccctggtcggacacttggggacagctgatttgaggggggatcctcggttcggcgttggcggcatttgggccggttcagtgaaaggcccttgtgtgaaagctgctgtttacggtggtgtaaaacgaaaaacaattcgtaactttttgtggtaaaatgcccctttataggtgcctcacacaggcccagccagtggtcctggggagtttgtgaggagcaagaaaggggtgaaggaatgcttgcgtgcaatgattatagggtttcaaggtaacgtggagattaatttttttcaaaggtgggtttcaaaagccgaggcagcctgcaggccagcaatagcttcattttattggagttcattggctctagctctttggggttttaaaatacgtgtttgtccgtgtgtgtacggagctagggttaaaatgaaaccccaaactgtgggggattgagcctgctttttagtatgattgtgtcacaggtgcaatgtcccccctgccctccccaccctactgaggtggtttggataatcttgctgggtgctttcaccacaaaataatggggggcctgtttccataacaccccagggccatgagctggctcttggaggctgtgtttctgggaacagggacagaggcctgggtagtccaggcttgcctcatgcctccctcccactgggctgcctagtgccctccccaaaaaccccaaggactgaggggaccatttcagtcgggtccagccagccgcggccggaggtggaaagtttgcctccgtgctggaagaactaaccttggccgtcttttttgctgggctgcctctcccattgccccctcgctccattttgggcttttatttatgactttatcagaggcagttagcagacatgaaacctggggtgggacattcgggggcgatctcagaatcggggcgcagctgcagaaggcatgccgtgatagccgggagcttctacttggcatggcgttggcagtgacgaggttggtaattagaagaagctcaagttccaccggggccttgcctgtaaaatgctggagacgtttacccggaggccacagcagactgggaacatagcacggagggcaggcatggtgtggcactctactgaggctgcggggagtccctctggattaaaacagattccgaaacaagcggtatccagctctcctgctcccacaggccagacctggggctagccagggaaaggcctgaacgtcggaggaggcagtctccagggccgccaagtgagggctgctattcgtcaaagctccagagccctgtctcctgccacacagtgtggccctggcccatgaaatgggatgaggtcaagattctgcagccaacagttggggccagcgctgggcacagaagccctggcgaggccctgtcctgcctttgtccatgttccttagagccagctcagcctgacagagtctcagggtcccaccaggggcttcccagtggtgttggagtctcccatcccggcacagttcatttttgagggcacacacacaaaagagaaggctctgaaaatgaaactgacacttgtctgtttttttaatcacctctggatttaacatcaagaatgtggaaagcagtggcccagggccacaaggactatggtgtgggctggtggaaggatgggccccggtttttctggttttgttttaaaccggggcctaccccaggatagtccgttgcctgtgctggggcctcaccaggccccagaccctcctgggtgagaagggtctccagggtgctgatggggacgagctgggctccacttgggcagtgcccctctgccatgttgaggtctcgtgcacactgcctgagcaggtgcaggccagcagtttgccttgctccgcagcaacagcgtggtgctttgcagcagggttaccttttgttatgtggtttgcacctggctgggtcaggctgtccgtgtgaacctgtctcactccctccgaccccctaaagggcggtggggcctttc

SEQ ID NO: 70365 - DNA, 805 bp, Homo sapiens
tttaaattataataaaatgatggtgccggcgctccagttttccgtgtcttttaactgtaagagaagctgccgtgaattgaatgggggctacccatcacccagagtccccgctgcccaccgtgtgggttctggcctgcccgggcacacgtgtcctgagcatggcagctacatgggtgttacctgtggggacctccccgcactgccaggagaagggcctgacggggattctggccccacacagtgcgatggttgcccagcctcaccgcctgcagctccatctgagaagggcctgatacgggctggggtccaggcccactgccctcatgtcctgagccccacggtggcctgcaggcctggtttggaggccattatctcctcggcggccagccgggcacagcagtggccacttctggtcgaggcagttctgtgggtgaggggcgagcatcgcctcctgcaaccgtaacccaggccctgcctcccctgccatgcccctgtgggtcccgtcgttgccatctcgtcctcagtggcttcccgatgttgcctgctggcagggcaggccccgtgccatggagcatgagggacccttcccctcccagggccaggcttttggcagccaggccaagccgctgctggaatggaattcccggcgttcctggtggggcgcatggcatcggaatcctacctgctttgtctctggcatcagctggtgagccagtcacgtggccgtgtgcgtgagaccagagcccaggactgagggctcctcccgggcgcttcctcctcgctcactcacccccacccccttttt

SEQ ID NO: 70366 - DNA, 1570 bp, Homo sapiens
cgtgtgcgtggtgccccgggtgtggacagcatgttggtacgcagaggtgcagaggtgtgtgcgtgtaatgtttgcacgtgtgcataggtgtcctcttatttctccattgcgtgaggttcctggtaggtcggcagtttccaaagaggtgagctggtgtttggaggtgcattggtcggagtgggccacacagtcctcagaccacacctggggatgactgtgccatgggctctccaccaccccagggatgcccgtgggaagaagggtggttttccccagtccagggctagccaaagctggcagcgggtggactgggcatccaggcgtgggcttctcgtaggtgctcagcactgctgagggaggctctggctgagtggcctgcatgctgggccttggccagacgcgctgctgcctccttatgtggacaggcggttctgggcgccggccatttgcagactgggaggagtggaagtgaggcctgcgggccccggagaggaaatggcggcgtgggcaggcccagaacaggaccgggaaggcgggccgagggagggagtggcccagaaggcctctgtcggccggtcagcgtgctagcggcctttctccaagaagcggccagctggccaggccttcccgggcaggtctgtttgtctgcccacatgcacacacgtgcacctgcgtgccagggcacggggaggtttagtggccttatttcctaatagggaacatagcagggcctggggtttgatgagacggcgtaacgcccagcacaccttcagacaaaagagaccgtgataaaaacggttcttactacaaggtcccagcttctgtctttaaaatggggcttccagcctccgcctcagtagatggttggaggcactgcatgagatcctggtctggggagcccctggttcgttggtgtttcccttgccttggcctagtaagaggggacgggaggcccaggctctgtggtgggcctgtctcagcccatttcaaaccctacccactgccttcccatgaccttaacaggatggcattacccagcactcacccagatgccagggtggcaccgggtgagtggcagtttcgggtggtcctggagaagggtcctggcatcggctggtatgagtctctgggtttccgagcttcaatgagggctggattcagggtgtgggctgggccagccattccggcaaaaccccagaaggaatccacaggaggtggggaccgggaaggcagccgggttgcgccagtgcctgcaagggaacctctggccccatttcctgggagcctgaccccgccctaggattcctggagtgggtgtgcccacgcttccggcccagacgtgggtggagggatcccaccctgccaggcctcccgcctgtgcggcttctttcaactcgatgagaggaggactcctcctgggcctggtgcttcgaggtccagacgagcagacactggcgcctgtgaccctgcagcggacgcccttcaaagtccgtgtggccgcatttggaagcctgggcggcgtggagacggcgccttcagcttgagatagtaagttgcccaatgcctgcac

SEQ ID NO: 70367 - DNA, 3182 bp, Homo sapiens
cgggaagaggcctgagaatgccgtcgagtgacgggatccagcagacctggtggagcaccggggccttggccagaggggctggagccctagacccaaggtctaagccctgcactgcctgcgcctggcccacaggcatggcggcctcactgagaggcaggctgcatgtcctcagcaaacacgggcaccagacggagaccagacagaggccagtaccaggcggggctgagaagttagccggagcatcctaggatgccaggaagccttccagaggtggcagccccgcagcccccgctccttcccacagctgacctccagggctgcagctgcagggcccctgcgtccagccctcggacctgccacgtcccagggccccactgccaggcaccgccccgtgccggccctgtacaggccacatctgctgcagcagccatgccagagctccgcctcccgggctccgtccccatggaaaccacggtggggggggctcctcctgcatttggcccgctgactggtttccattagagccggcctgctttccctgagctctgcccctgcagttcaaggcttcccctgggggtttcttcccacatttaccgagcaccagccgttccgtgccagggaacccagcggtctgggccccgcccgccctggccagcacccaccggtggtgcctgatgcccggcaccgtggctgctcccctgtcctttcttatcgaaggccagctgctgctgggtcctggtgtcgtggactcagccctggatctgagtcagggcactgggctcccatcctggctgggccgtagaatcactggtgggcacttgaataagccccttcctctctccgggtctcagtttacccatctgtaaaatgaaaagctccatctatttcttgagttccttgcaatgccgagaaagaaagacaaagagaaaatgaagccacagtacactgttgctgccgggttctcagaactgggatttttgtttgctttcaaagagggttttttttttctagggaaagagtcatggaatttgaccagagatgattgtttgaggggccaagagccagccagagcccacggacatgcagcatggaaggtgtagccagaagcctgggcagcgatacccgccggtccgccttggcatctgcttggcacccagtgacctggctgtgaacacagtgagcggaggcaggaagtgtgcctgcgccggaatccgaagggctctggaaaactccccaagaggtttccggaggtcagaaatgtgggcagaaaatgagatccagcttttaaaaacctggccgactcatcccccgggagcctagggaggcctgggaaggtgcctccaccaccacgtggctgagttacgagaagagctcgccgggctggacctgggggtgctgggctgttagggtcggcagcaaggtggccccagcccagactacgtcctggtggtgtcttcctcctccagctcttgggagttgggaggcttcagcggggaggtggtgatggtactggggccttttgcctggcctgccagtggccagcatggctctccccgtgggaccttccagctcctgctgcctggggtggtggtgcgcgttggcctcccctgggccctgtgggtgctggtgatggcctgggaacacgtttccagctcacagatgaacagagcccgggaggtggaagaccttcttggcagcagggagtgaatggcccagtggggtgggcagcttgcttagcctcccccagcctcggtatcctcatctgtaaaatgcggctagtaaccttgatctcctggtcagggtgagagttagacgagacgagaggcgggatcaaagctggataaatggcaggagacagcaccggaactgcgcccaccccgcatccttgtcatgatcaaggcagaccacacgtcccagagagcccagctccatgatgggagagcagggccaggctgactgtggtcaggcccacctggaggggctgctggcaggctcttgggtgacagccaccctgccctggtggcccaggtagcctgagagttggcgtttcctcttcctccatctcagtcaagaggccgagtcaattccccactcagcttctgcccctgcctcctgcccgaggcaacctggctttgctgactggtcccagtgataggggacattgtcactgtggctcaaagggcgggcttggtggcattttcagttttctgtcctgggaaggaatgaaaccttggttcgagtggccgcatctgggtggccacggcctttgcaccccctgcctttgcgccccccaccccaccatcccgatgaaagtaggccgagggcgtcggcacagagcggccgccgcggtcctggccagggcttgatttagatattcggggagactgggataaggtaggaaatgaaggaaatttccccagggaaaggggaagagaagacggaggagcttaagtacccacatgattattaagcgtggctggtgatttacggccgggcaggcggctcctggcggctccctgccccctccctcccagtgccctgcaccctggagagccgccatggggaaaacagaggccaccaggtgggcccagcacccgagctccgccttatctcctgggtctaggccctcggcagtccctgggcaggtgacgcagcacgggacacagctcctccatgtgctgggcactgacatctgtcattggggccacctcacagaaccctgacggatcaccggccctgtcttacaggccaggaagcccaggtctggaaggtcgagcctcacgtggccctctaaacggtggagtctgagccagcctggccaccggcccaaaccctaggcctttctctctaccacggccaggttcagtggcctctggtgggaagggctggggaggcccttgtccctccttagaacaagggatgcgggtggaatggtggtggctgtggtcgcgaagcaggcctctgcccatcctgccctgtctcctgcctttcagggtgcctgtacttctcttggctgaattccagtctccccttcaggggactcttgagaccctcaacagccagccctgaccccctccgtggccccatcttcgacctctgtagactatggcctagtgtcacctcctcctggaagccctccttgctctccactcacccattgccctgctgtggggcctggggcc

SEQ ID NO: 70368 - DNA, 4610 bp, Homo sapiens
cttggctggggcagggctccaggaggggccgagtgggccccacccccgacccttgtcggcagggccccgaaagttccacgctgttgggggggtgccgtggaaggtggagcggggagcagcctccgatccctggagcaggttccccagcgttcccgtggcagccacttcatggcacagtggtccccggagttcaggccaggccctcgagccgcctgtctggggaccactccaacctcaggcaaatgaggggcggccctccccgggtctgggggcaaaagaaggttttgaatccggaagcccaggctcagtaggcccttgccacctcccccagaggtcatgcctcaggctaggccacctgggctgcaacatgggagggcatcagtgccccaggcagcccccagtcccccggggccactgcaagacccttagacgggacgacaaggcctctagaagccccggctgctgggagcctaggcagaagaagggcccacctgcctgtctctggggccgtgcgcggggcgggcactgtgctgcttttccggtggctcctgctcctcccggccccatcaccactcccacccgcggcggcctttgtcttccaagcgctctgcaaaatggccgcccggcctgccgccattttgtggctgaggtggccgtggccttggagaggcctgggagggagggcggccatggcctgcctgcctgcccttggcggcctggacagagcccagcgccggcccccgcccagtctggccttggccgtggctgccccaggcttggcaccagccagcctttggcaaggcagcccgggagtcctggcccctcacccagccctgccggcccctcgccaccctgaggcagccctgctgagcagacggagaagccttgagccagggccgggccagtacagcctcgctggcgggggagccctgggccgagggcagctcaggcgggtgtggggcccacctgggctcccggcacctctgcaggggtgacgccttcaggccttgacggctgcacctatcgcgctcctggcctggcccggccgggagtgggtctctcagtggccggcccaacttctggcttagagaggggcaccgccatcctcaggaagagggcagggccgcactctggccaggatttccctgtgttggggccagccaaagtctctgacacacaggagtggaggacctgttccctcctgggcccctccacagcccccactctcctgcaggccccatccccgcaacctcagccattccagacagcatctccctccccaccagagcccctcggcctctcctgagcctctgagcttgcttcctgccccgtcacaggcccatgcacctgcccttccagtagccagaggatcccaagtggcacatttccgaagggacggtctccaggaacccccaggggccagggtggctgcagagcagcatcagggagatgctgggtgttggccgtggaggacaattgtgcccctggccaggcggggagggggcaggtggaccctgtgggagccctgtgggagccctgtggggttggccacacatcggttcctgctatccttgcaacaagatcccctggagggcagtgtgcctcctagaagaaggcaggagaaatcaccacgtgaagcagagaatggcgtttgatgagtgtgtgctttttctaggggtcgacgcaggtcctctgggcagcatggggtggtgccgggtggaccccacggtggcctgtgttcgccacgtggccgtgggtcagttcctcgctggaggagacccttccccagacacctgccgggcacccagccaaacccttgaggcctgggaaggtctctggatgccaccctacaccccgcccagactcctctccctgtggttcctggacagaacattccgtcaccacgaaacgaagtttgcccaggccctgccttcaccctgggaaaacccagccgggcatgggaaggaggaatgctgcccgcctgcccgcccagaccagagtcgccccacatgccaggccaggcccgcatcctcctggggcacacgggagccccaggcttcccggcaggaaaagccccccaccgcagaagggctggtctctggtggggagttgctgctgggtggggtgaccacagggcggggttcaggctggggtatttttaatgatgtagttgcatctggtcaccgccccctgccacccccgattctttcctgccctccccaccttgtgacccagactgtggcttgaattaagaatgttttcagataagtacacgcctttgaggttaaaagtatgcctaatgattaaacaccagacagagatccccacaggagaagagcgggctccgcattcctgcttttcccctttggactccaagcaagcctgtttgcgtaacccgggagcattaaagagcagcttccccggattctccccacagccctgggggctggcgtcctgacccatcatacggaggaggcagctgaggcccagaggggttaacctaccccatcccaggcccatcactgagggagacagagcaggtcagaaccaagcctggcagcccccagggctgtgccccatggacgcaggtgtgtctgcagagcagggtcctcccctgccagtgccagccctcaggtgtctcgggtgctgcgttactcttgtgagcttccacgctgacacctgtggccacaatgttggtgtctgctggacctctggccctgttctaggtgcaggacatgtggccacagcaggcctggcccctgccccagggagtggacattccctgagcctgccccccacccccactgagaacttagtggctatgagagaacaggaaagcaggaagctagacagggcacagacccccgacggtggagaccctgacccggagcacgtgggtgtcagttttggggaagccagacagggagggtgctaacaggagggccagtgaggggaccttgggaccccagacagccctggaaggaaggcagccctggaaggaaggcagccctggggtccgggccacgctccatcctgggggcacccccttcccacctgcgtgcagtgtgcagggccgggggaggagcctggatctgaggagtgcagttccagttgtggctttgccgcggcgtccccatggcatgctgttggggaccgtgagactgtgggcggcctagctgtattgcagcctgaggccagaggagaggtcagtaacccttacccgtcccatcttgatttaagtttgatatttttagatcatggacgtttctgcattgattttcttttttaattttgcaatcagatatttctgctgatggctgggtttttggtccttttaacatgcttcccacacctcgccctggtccctgccctgctgcggccgagccagagccgcaggctgccccgtgtgtgtctcgttagctttctgggccgtgtttgcaggaggcccgcctcccgtcctagcccccggacgccacccctccctgtctttttcccagatccattgttggcacggcttgctgagcagagacactggccgctttatggggagaaacccaatcagggtggcgggggtgtgctccttgggggggtccggctcccagtggccctgagccaagcccgaggtgacttcggggtgacaccgtctgtctgcctcacttgctccagacatccgcccggccctgaaatggccacctgcccaccgaggcctccgcacacctgtcctggctggcccggcccctcccccgcctgggcctgccgggcaccctgcccacgggcagacaccgtggggccggggcagcgcccgggaggtggcagctggcagatggcagagcgcctgccgactgctcactccccgtcagctctgctcaaggagcaccgtttacgctgcatggccctcccagccctcatccaggctggctgcgaagggtttctctggtctgtctcaggaagcctcctgagaaaggggagattcctgctgtctccccaggcctgagccccatgctcacccccagggctgccaggtaggtgggcctggagatcacccccgcacacaccccacaacacgtgcaactggccttctccccaccagctcagaaatggctccatgagtgggtcacgaagctgaaacatcagtctttccccaccccacaccccagaaagccctggttgtcggctggagttctcctgattgcgtgcagatcctcctgcggtgggggtggagcccgctgaggtcacagcatctgtgtcctggtcctgtggagcacagcagggttgggtgtgcaggaaatgtgtccatacaccctcctcagagtcccccggagcgggcactgccacattcaggctccctgaccactgcaggcctgggtggtccagatgcgagtcctagagccttgcgggcagagctgggactcaccagggaacacagggccctcaggggaaaggagcaggaaaaagcagggtggttgtgcctggcagagggacaggccagggcaatgctgggagcagaggcctgcccgggacacttgctgctctgggaggctggagggggagcccgggctgcgggcatgctggggaggggcagagacagtagagagggtgtcaacagtggt

SEQ ID NO: 70369 - DNA, 991 bp, Homo sapiens
cacacatcagcacggggcacagaggtgagagcccagaaagagtcttgtttccatttcttttaaaacgggaagggaaaatgacccctccaatactgaatatataatgtataatgagtatattatagactggtgtagatgatggggtgaatatagcgcgaacccagcctgggttctgggtgtcttaccaccccagtcatgggtgcggtttgtgattttgttgtgaattgtggaggaagggcccaggagggccacatgccctgccagggaagccatagagagccctgccccgggaggtcagtgcctccttcaatgcctgcgatccctcaccctgccctgcttcccccaccatccgccccgcctgggcagcctgggccactgcccgccagccacccccgccttcggactgtgcatttcccgacagcgacaccgtgtggcagcagcccccacctccgaggccagccccgcctgcaccccccccccacctccgaggccaaagctgtgaatagggtgaccccttctgggctgtggaagcctcgggtttgaggacaatcctggggagggaccccagggcgcttcccgctctcctggcgtgtgtgtgtttgcgggggaggtgtgggggcctctgtacccatcacagccacgtgccgggaccgccggccatcgtcccgagccagcgacatgcctggcagcctcccgcccacctacgccccgctcaccaccaaggagctgtcagcatcactgcccccaacggcatctggcaaaactgttgggggtgagccagagggagcacccccgtccccaacagcgctgagttgagagccacatctgtctccaggcactgccaccagcaggaagggaggccaccctgagcctgggaagactccggagctgggttatctgaaggccgggagttcaggtggccccaggcagaagaggtggcacagtgaaggtccacacatgggaggcgggcggagtggctgagcctgaaagt

SEQ ID NO: 70370 - DNA, 2217 bp, Homo sapiens
tggggctcaccgtggagtccagtggaacgggcaccatgcagcaggctccttggagcaacctagagctgtggagaagcaagatggcacctgtggcttggtgggctggagattcaccttctgtccccagagccaaggacaagctcgtctgaacacagcctcaccagggctcagctctgcatgggggctgagggtcaggtctacggccccactggccagagtgttgggaaggggacagcacccactgcaaggccaggccagcgtggacctggcagtgacccctgggcgggccatgtgccctcccacctgtctcagagtatcgcctgagagtggcgtcttccaccctctgaccgccatggctccacaggcagcccgcaagagcctccagcctctggcagccctggaccagaccttggtaacacctgccccattctacacagccgaaccaaggcactgagcgctcaggagcccagaggaagcctggtggctgtgagccgggccggctggctcattcagcccaggccccacccgccctgggatgatctggaccccggccctgctctcagctctcaatgctcccttcccagatgagccaagacgtcccatgcagacggacaccttccccaagtgcccgtcccggcgctgcacagcccacgccctgctgtcccggggagcagcatcttccaccaggctcagtgtcctctcttgggggcactggaagggctgggcaggctgcagctggccctggcccagaaggggccaggagaatgttccagtcttgaggctcacagcaggtaggacagaggctcggtggcaccagcccacacacccctggccgcggtgctcactgctgccccgcagccatgctcccggcccctggttctgctgtcactccctgtgtgatctcagggtgtgttgtcaccagccacaccctgagatccattctgaacctctccatggaaggctgggttggaggggtgacggcacaaggccttccacaaggcaggcgcccaagtcacatgtggggctcagcccagccccacagacaagaggcgtgtctgtgacccatgagttcagaacctcgtcgtgtgccctgggccgccgccccaggagaaaggtcaggagtgttttgcagagacctgcccggaaaggctggagctcggcacaggctgctcctccctgcccaggggcccctcccccgaggttcccccacccccaccttggcatctcagtgccaccacactgagtgacacaccagtgagtctcagaagagccctgtacagacaatgagacccacaagtacacagatgacgactgccatgtggctgccagagagagccacgctgtgggtctggccggaacctctttcctttgtgcacctgtgcccagcccatgcacaacgcagagctgacaccaagtgagcatctgtcactaagtgaggcaggcaaatgaggtaacactcaatctgggctttgaaggatgagtaggagttcccggaggagaaaaagagaggcccttcccaagtggaggacgcaacaggcgcagaggcctgaaggtggcgggagctctgtgtatcctcctgctgcccaccctctgcatgggctggcacgggccgggggatgggctgaagaggttgtggcccctccacctgaaggaagaagcaggtcctggtctaccaggaccagtgtccactcctcccggcccctgctctggccttgcagtctgtcccctgtcctggctccccagcacagccctggccactgtccctcacggctccccttcctctcgcagcccctacccctcctccaggaaccccctttggaccactatgatacttcctgtccattcctgccgcccctgcccctgacctcaccctggtcagcccatgtgacccccactactggctggacagcacccattggacagatgcggatactgaggcccaggagggtgccaggtggcccaaagtgacaccctcagctagggtggattaagttaggaaccccttgccccaaatctggggccgactcctagtacaagactaaaagccctttctgcctggatgcctgcacaggggcagctgcccaggctgtatgggggcaagggtgccctacccggccccacacccacgacctcgagacctaggcagcccctgcccctggtggagcctcctgaagtcccttcctgtggtaagcgacacctccaggcatgcctcagcct

SEQ ID NO: 70371 - DNA, 913 bp, Homo sapiens
tggggtcacgagggttggggcagagagggtaggttggtaggtgggggcttccccaggcaggcgccctgcagtgtggacaggaagctggtggggataggacatgaggcaggggctgcatcccacggccctcaactctctccagtgatggatgaggggcgtggattcagcggccccctgcctctggcagagactgggtctgggattggtgctgccaggcctctggccccattcccaggaccagtccctctaccctcccaggcccaatctcgtcagccccggcacagggattcacgccggggatgggcctggctcagacggtgcccccctcctagcccacatccaggcaaacagccgtaagagcagtgagagcgccctctcctgggagcgctgggcaggtgccagggctgacgccaccgtaggggtacagggcaggggtcactcctgctaagccccagggaagcccctccctacaagttgggtcccaggtagcaagggcaggaagggtgtttcgggcatggggaacagcatgtgtgaaggctgaggtggagggaagtgggtgggtccggcagggggcactggtgggtttggggttcagagagagagccctgcgttcagtgtgggccatggaaggagggaaagtgctctaggcaggcagaggggagggaggcagcggaggctggggatagacttgggccctgtgcacatgaggggaggggacggaatgaagacactgagctggccacagaggtcaccgaggttgtccggaacacgcccaccatatttatgggacacctcctgagacccccaggcctatttcagggccttcagtgcagggccccgggatcagcagcgagcagcacaaatgagaccctgggctcagggagaaacacaggaggggaagagggggcgcagt

SEQ ID NO: 70372 - DNA, 1764 bp, Homo sapiens
ggcaggagctaagagtgtgggtggccagggtgactgggacaggggttgtgccaggagcagcctcatcgcccctgggtttcccaagagccatcagtgcccatgcccgggtgcttgtggctctcatacctcaggacgagcagcaggattcggacccagggtgctggggtctgcagccccccactggacgctgagatctgcacagcctcagcactagctgctctcagccatcaggtcacccgtgaagcagcatgcagggacccggcactctccaccccacagagagggctcaggcccctggtctgctgtgcagacccaacacagactctcatcttgtagttgttttttttttctttgtttgtttgttttgagacagagtctcactctgtcgcccaggttggagtgcagtggggtgatcttggctcactgcaacctttgcctgccaggttcaaacgattctcctacctcagcctcccacgtagctgggattacaggcatgtgctactacactcagccaattttttgtcttttgggtagagatggggtttcgccatgttggccaggctggtcttgaactcctgacctcaagtgatccacctgcctcagcctcccaaagtgctgggattagaggcgtgagccactgcacccggcctcatcttgtagttaatgctttctgtgtacctggcctgtgctggccagcgccatggtggtagccacccacttgacagcagctgggaggtccctgggcacaaggagaagaggtgacaaggccgggtgggaggagcttggtctcgcacagtcctgaggtgacagccaccttgggctgcataccactgacctggccctgcaatggaggcagttgcccaagtaccggctgctggctggtgctccgaggcagagggcacagtggggtccagctgggttggggggccactgacagccagggagcagcagggggctgggttgctgtattatcaagggcacagctgtccctaaagccactaggccaaagggcctcctcactcctgtgcgacgtggccctgagagtccaaaggccaggccaaggtcacgccatggtcagtgccggccagggctggaagccgagcctcctgacccttgcaccaagctctctcctctgttcaggccacggcatccaggcctggggccacgaacccgcagttttctcccgtcctggggcagtcagccctgggctgtgggggctgctggggctgggggtccgaagggctgcggactcccaggaaggagatgtgagctctatggaatcctagcaggagcccgtggcatcctcagctttccgggtgtgctgggtacaggggcagatggctggcatgctggggggcctgaggctctggcaaggcagctgggcacagcctgaaggtctgagtgcctggcccccagggagggatggctttgggccacctttgaaggcctcttgacccgcagatgatgcagcctgcagccacctccgtccacttagcaggtcctttccagcctggcaccgggtcacaggtcacattggcccctgaagtgccagcccacagctccaaggagggctacaggggaacatcggctggctgggaactcacagagccccaggcagcgctcagctccctccccggccctgccacagggccctgctggcctcttcaccccacacctccctgtcagtcctccttccagggcaaaggccccagctctcacttggggctcaagctatcctgggctcctcactctctcttggtcact

SEQ ID NO: 70373 - DNA, 1087 bp, Homo sapiens
ttaagcccctccccaccacctcagctgtgaccactggttaacatgtagcatgcagcacttggtgctaatcagatggagtcatgcctctgctgacaaccctccatggcaggtgtcccacagcccttaggaccaaagttaaactcctcactgggctgcaagacctgcctggccagggccttgcccagctctgcccgctttgtgccatctccacactctctccccttgaatgtctcctgccacaggcttctgcacatgctgctgccacccccctggagctgtggggccaggagcagccaccagggaaatctgatccttgaccctgggctcctgagtctgccagaggctgccgtatcagccaacagacagcttctgcaacagacaaccgaaccccgggggtacccagggccaggtgctgatggactgggactcgggagagttctcactccctgccggggaccttggccacatgctgccattcctggcccttcgttcctcatctgtaagatgagcataagcacagctgccttgtgggactcttgtagattctgtcccctagtatgacaatactttgttaccttggacccatggggttttgctgtcagtaccaggatggcaactaaggacatgcccatggttggccctcaccgacgaggtccagcctcgggtcgccaagcagccgcctgctcgctgccagtgagccctccctttctcagcccacggcccctgccccggtggacttccaccacctgacctgcaggcacgcttccaggagctcagaggccactgccctggcggatgacaccctggaagcacacactcccccttgacagagagctttgcacatcagcagagggcaagccagcagcaaacttcgcaggccctggctggcaaacagactccagcctggaccccaggcccataggagaagcttcaccctggcagggtcagggaaagcactggggtccctgaacacagatgaccgtcatcacctgctcccagcactcagggtctaactgctgccctgtactgagcggccaagccctatcactccaggttgcctcctccagcaaccccttcccgtctgaat

SEQ ID NO: 70374 - DNA, 4072 bp, Homo sapiens
tcactaaggcgccagagaggaaactcaggtggtgctcagagacattttcaggagcactgatttgtcctcaaagttacagatttctactcagtccctgcgccagcggtgtttctgttctgtcgtgtggccctcatttcatcagcactgaagaaggtaaagagagacttcctggagctgggaatgggggtgagggtgtgccctttgtgacagttgctcccatgctgggtgtgtgacaaggtcttcgtggccaacagaaaattgcttcatctctctcatctgagcgtggtttcccagaagaaacctaccacccccgggaagcatggatatggggctgtttctggccaggatactcccaagagaagagtcctgaacttgcttctaccctcaggacgcctgcgggagactggctgacagcatttgattgaaaatgcttatttctgggacacatggatgaaaaacaagttttctctccctaaaaccttgggagccccaaaaaacccaagaatatcactttcctatgtctgctgagtgtacgtgaccactctgcacacccccacatagcctttgtccttgttcatgagaatgttcactaggtctttcaacacctggttgacctgggtggtgcatctgggtcacacacctgtgtggaccctggtccttgagagtctgggatatgggtatgccaggtaatgtctttgagcccggaggtcctcatgaggatgtagcccctgagctctgcgtgggcagcccagggtcagcttccctcaccaaacacaacaggatgacaagcttggatgtggctgcctgcacaccccacgagatatgcaggatattacgtgtacaggtcaccctataaactctgaaacaacataaatgatagctattgctggctaacatgtgcaagagaaggtgaggttgccgtgtgccagtgggaaggatatgtgggtgtctggagggtggggcaaagttcaccataggtgcctggctaatcaacaagggtgagtttaagagaagtttgtgaaagggccagttcccgcctgatctccagttcccctgcctaatgagatctgggtttgctttccggagtgggtcctcctgggcgcccgctgccacaaatagcacagtggcaggcacagctggcagcggagggcaggcagtggagcgggcatagcacacattgcgttcccgaggaggggagccctgatgtgccggcacccaggggctttgtgcattccgctccggcagctcgagcgtcacggcccgaacaaagcggctttgcagggcgctctcctactcctcgccattggccaccgggccgcgacctctccttgctctggcagagtcccagcgccttgcgtaggcacaaagtcagcccctcaccccccagcgcatgaagtaggggcgggcatggctcttgggccgctggagaggggtggggttgtggggtcggagctggcggcgcctccccgagcccgtccgcgttgcccttcaccctcctcgttcccccgcccaccacaccgccctggcacctcccgccacctgtttccttgtcctcccagctcgccttccccttctccttattttgcatcctggggttccagggacaaggtccctcccgggccgcctcccaccctacgcacttctgagcctcaagggcacccggtcccgggtcccgggtctagaccggctcatcgcacagagtagcagagccgggctcatcgaggaggcaggaggggctcgccagcgtggcacgggcgcccggcgggaacctccacccgccccgcggccgcgcgtccccgcctcgaattcagccccgccccggtgcgccgggctggaggggcgctgacgctcagcggtgtcccatcggtgaccttggacggtccctccacctctccggcctcagtttcccttggctgcagcggccgcggggcgctaggtgggagccgctgagcgctcccggggccccgcccaccgcgagcagccaatcgggcgccgccctccggggggtgtgtcccggggccgaggcccggggcccggagggcgcgcggggcgggcggggcttccgggtcgggcctcgggacactggctcgcgcggaccggggcagggggcgggccgaggggcggtgcgtgtcgcgggggcgcggctggcacggacgcgcggaggcggcgccgggcatgggccgtggacgcggcggccccgcggcgggggcagcgggcggcgggggcggaggcggccgctagcgccctgcccggcgccgcctccttcggcgttcgccccacggaccggcaggcggcggaccgcggcccaggtgcccgggggcgggcgggcgggcgggcgggaacgcgcgcgggggtccgcggtccgggcttcccaggtcccgggacccggagggcggcggacgggggaggggcaggggctgggcggcgcatgcgcggggcccggggtctcggggtctccgggtcccggggacccgggggcccggggtgcgcggctggggacctgagggcgaggagcgaggacacacaccgaggactcttgcgagggatctcggggcccagctcggcctccctcctagcgctgggggcctgcccggaacccgagtccgcggctgtccctggggtttggcgctgcgcggaggtcgggtctggggaccgcagcgactctgggtcttcgggttgtcccctcggagggagggcccacgggcggggacatcgggacttgccctttcctcggcgcagcggagctggggcgtcgccgactcagaaggtgctttccgagacctccagggatctccgaggcgaggaaacccgggccccggacagaccgaccctgggtgggtgcgcccggcttctgccgtcggacggagacgcgcgtgtttgttcctccagctgcgaccacctttgaggaacggttcccactttgtgccccaacgcggcggggcgaccccggacaggctgcgctgggccgggtggcttctctgcggaagccgcgccacgtcgctcccggtcggggccgctgagggtcgggcgcccaggtctttccggagtcccgggctgcgcggcccgcgtggtgcgggtgaagctggaggggcgcggggtggtgccagtggaagtcaggagggtcggccctgccccctcacgcaccccaaccgggcacaactgcacgcctgtgcttttctgaagtcttttttaaaagttaaaagagaggaagtgtgctccaagtgtcaggattctttccaagaaaaacccacagttgtccaatggcctgggcttcgtgggacctccggggctgcacgcccacgtcagcctcagccgacccctgccaggaaaccagggaggcccctcctctcccagcctccttgggataagggtgccttggggaactgggtcagggcaaggacacgggattttcctgggaaggaccctgcgacacccgtgtcgttgcggggcagggtcagcatgactttcctcttccaaggtgaagagttggggggcatccagagaacaaccgtaatcacttcctccttcaccttcttactgccaggctgaagctcagggccctgtctgctctgtggactcaacagtttgtggcaagacaagctcagaactgagaagctgtcaccacaggtaaatagaaggtttaatttactgtttccagatggaaatatttaagtgttttcagtgtttacttctgttgcactacagaccagcaatctgggggttattactttgtgatgcaaggttagatacgttttcagactgaaagtaaaatacatgtgcatggattcattttttttttttttttttttttttgagacggagtctcgctctgccgcccaggctggagtgcagtggcctaatctcagatcacagcaacctctgccactggggttcaagcgattctcttgcctcagcctcccgagtagctgggattacaggcgcctgccaccatgcccagctaatttttgtagttttagtagaggcggggtttcaccatcttggccaggctgatcttgaactcctgacctcatgatccacctgttcctcccaaagtgctgggattacagacgtg

SEQ ID NO: 70375 - DNA, 1250 bp, Homo sapiens
ctggcctgtggctcagtttccctcagctacaagaggggtgcatgctagggtttctctggattgctgcacctggcaggtagtgtgagcttggtaggtgcttccttgcttatcattgcctctcccatcttaatgttgtcccatccatccaatgtttatgggatgagaggttgataggagggcatggccctgacattccagggactgaccgacacgctgtctacacaaaccccttctggttcttctcgtgcactgggcgtgccggagacacactcccttaccctcataccccgccgcacccctgtgacctctacctttgagacctcagcttaaactcactcttagggaaggctccctgaaccacctgctggggttgtatgctgatgcaggtacttgtaacacctggtgcttttcctttcgtgcactcaggcagtgtttattcaagtgatggcttggtgacagtggctctccctgagaccccgtgaggccagagtccttggctcatcactcatggttgaacccggagcctcttgctggtaggtgcttcaggactggctctgggagcctgtggctcctgccgggtacccaccggttgagatacctcaagttttaaatgccacctccttcctgaagccttccttgctgctcccccaaactagaggcaggagttttgtccttcagataacctatggcatttgagtcactctgatttgatgaattctgccttcacttgagcagctattaggggcatatgtcagtcattcattcctcagttcatgtatttattcagcaaatatttactgagcacgtactgcgtgccaggcactgtcctgctgtggaaaacagcaggcatgattccctgccactaccaaccactgcatcgcataactggcagactcccagcttcaaggagaggcacggagggaaactgagagcagcctgcagaggggaaagagcggggacagagggtcacggaggtcgcaggggcgtgtgtgcagcacctgccagtgaacggaatgtgcggctccagatgtcgttgtctttaaacttcggaatttcctttcactaaagaaccaagtccagggggaggaaagagtgaatacaaattatccaagaaactcaagagctcattttagttctcctgattatgatcttaaaggcattaagcgctcaagttaaactccttgtgacccacataggttagcagaatttaaatcctaggtgattcttaactctaatcatacatctaatga

SEQ ID NO: 70376 - DNA, 800 bp, Homo sapiens
tttcccaacaccctatccacctgtccctcacctctcagcttttgtgagactctgtctgtgctatgaaactgaagatctaattcagtgctgtttgcattgtcttgcctcctggaccagaggttgcagttgttgagaaaagggatggttggttatgccttgatcccccccagagcatttggggcataggacacgggaactggccagcctggttcactcttctcgattagctggacagcggcatgtcatgtgggtaataggaaggggtggggacttccccgggatattctgctcctgatcagaagcgccagtgatgtggggggagccccagcaccagagcatgctgggagggcgtgcagggtggggcaggtgcccgtttggcctctgctgtctatctgggggatgcatccaaaggcaactgttccttatctgctcttgttgggagcaaggaagggccaatttgttcaatgatccgtatacagccagtccctctggccagagttcaagacagtattgcctcactctatatagagattgtatcttggttagctcttcattcatagcaagaccaatgtttctgtaaattaatcctggtattgtttaaaagcaactaaaaatgatgaaattgtaaaactttgaaactccctgaatataacgacaagcaaactaacattgttttattggtcgatgctcctggccagaagagagaatattagcagggataaaaggcataggccacatgcattttccaccccagtgctgagaacacgatgggcgaaaaagggaggtggccacagcccatc

SEQ ID NO: 70377 - DNA, 1720 bp, Homo sapiens
atctgcccgcctcagcctcccaaagtgctgggattacaggtgtgagccaccatgcccggccccagctacttgctttctattgggatgaacctcatggttaatacagttagttagtgactgcaacttttgaactttttgttcatagtgaaaaatattttaagtaatgcttaccccattatgtttcttgtcatttgaaaaaaaatctcccttcagacagaatgcagaataaaatactacagaaaatctgtacagagtcccagcctgacttatgctagtaggttacagagaaagaaagtcttctaaaccctatgaaaggttaacagttctcttatttttccctgtgtgctatttgatgatttccctgtgaactttgatgatttattgccagaattccaaacataatatgtgaatttcacaaaaatggatgaaatgtatctatttttcattggtagaagaagccaaaacatcccttcctcaccgcactaaaagctgttgtttacatgaagcaaacctcaaatgtgaacatatttttacgcaaatgcatttaatgggtgaatatttgctttgggacggtattctttactctatctggagagtctggcgttccgtaatcaccatgtgatgacggctgccctgacagtggctggtagcagcacatacccccgagcctctccgtggtgtgcgccgtgggcaccatgtgaccattttcagaaaggaagacagttctggaagctaaaggtcacctagtcagcctcgttgggtgattgatgactcagctgggttcagggaggtggacccgaggcagagcctctagaaggcagcggtgggcagggcggttcaggcaggtggcacctgggcaaaggtgcagacgtggaatcctgaaagcaattctcagcgctgctgcgtttccaggaggtagaagaacagtgacaagtgcacagtcgggtagggacaaatgtggaagggctgggaacagtgtgttcaggagactgggcttcaatctggaggtctcaggaagtggtttaggatgtttcagcgagagcatgatacagactaacccaggaagaaccgctgctttgtcacttatacccctatggaaatgccgttcgctttgctagttgaaatagcctaccattgtctgggactcacccagttagatttgtttggactccacaaagtattcttgaccatacaatcatggtcgaggaccccctacatgagctgccttcatggctacagggagagcacaccaaagtggatgtcacacccagcacacatgccaccggcttggccctgcgccccgcagcctgagccacactggctgcctgttcctggaatgtgccaacatgtttcagtcctggagcctttgcacttggtgttctcttcgctggaacattctcccccaagacatttacacagcttgccccctcattccctgaggttatctcctgccccctaatcagtgaggccttccctggcctcaccccggacactccacacgtgcattcatttcgttgttcaccatctgtgtcccagttacaagggaggctccctgagagcagggatctgatttttgttagttgttgttgttgctgttttgaggtggagtcttgctttgtcgcccaggctggtgtgcagtggtgcgacctcagctcaccgcaacctccgcctcccatgttcaagcggttctcctgcctcaacctcctgagtagctgggatt

SEQ ID NO: 70378 - DNA, 588 bp, Homo sapiens
ctgacgggctttccagagctggctccttcaggtgcaggataccctctctgcttagtctgggaaaaggccccgttggcaggatgcccaccaccaggccacactgcctgaatctattggcagagctctggttttgtggccaaggtgggtagtggaagaccatagcctgtgtcccttacacatctcagaaagcaaccccatctgtgggcaagaaatctgttagggagaccaagcagcggcctggaaacaccttgatctctgcccagtggcccacatgcggtcgccgtttcatcagtttccagcctgggtgacctcacagccccagccacgccccacagagcctcaggaaggcacactgacctcagggccggcggctgacttcatttctgtttggggatgagaggcggcacagtaaactgtccaggccagtaaactaatggattcatacgaaccgtaatgaacgtgggctgtgtgctggggaaggcaggctcgcctcctccctgcaggggctgctggggtgaaagcaaccctgaaatgttcaaagccttgatggggaagcacgggggatggatagattttaatttcaaagca

SEQ ID NO: 70379 - DNA, 2053 bp, Homo sapiens
tgtaatcccagctacttaggaagctgaggcaggggaatcacttgaacctaggaggcggagattgcagtgagccgagattgtgccactgtactccagcctgggcgacagggcgagactccttctcaaaaaaataaaaattaaaattaaataaaataaaatattagccgggcgtgggggcgggcgcctctaatctcatctactcaggagactgaggtaggagaatcgcttgagcggggggttggggagcgggggctgggggggcggaggttgcggtgagccgagatcgcgccactgcattccagcctgggcgacagagcgagactctgtctcaaaacaaaagttacgatcgatcgcgggtgtgcgtgaacctgatcccgcttctcttctgcacgccggggcgtcctaggcccctgccgaggctcctgggggcggtgcctgtgaacagggacggctgagagggtccggggatgctggtggtccccgcgagcctccgcctgccctctctcgccccagcgctgcccgaggtcaggggggacagtcccgtgaggcccacaccccgcttctcggtcccgtccccaaagctgagagcggctgcgccgactcctggcgcttggaacccagcaggccacgccggcgcggaactcagtcccggcgagcgggaggcaccctgaggcagcgcagggaagggccacagcacgctcgccccagtcactctgccacctcgaactcaccgccgccctcgtcccacggctccgcgtccaaggcgcctgagcggccccgccccaccgcggcccggccaaccccggtgcagccgcagacgcaggcgcggagcgggaggcgggacctcgcggtggttttccgcctctgccttgcttttccggtcgccgcggtcctctgcgcgggatgtggctctgagcttcggggtagtccgcgaggctgggttccgtgctgaggggcgtcgcgtctggccgtgcgctgcgggagcgcgcgggcctggcccgctgtcctggccgctgcgaggcgctcagcttctttctgagtgttccgccgggttcgacagggtcgaggtcgccggcgcgaggctcccggatagctgaggggcgcgagggcgcctccagtctcccacctgccctcccgcgccgcggactaggctgccagtctaccccaccgggacgtctgcccccgcatgcaggagggggtgtgtcggcccaacggggtctcaggacctgtccctgctcctccaaagcccacgtcgcctgcggcgcccctcgggtctgcgccgcgttctcctttagcctcccgggcctctccgctgcccctcgcccccaggcaccagccacacctgcttccttctgttcccgcccgtggcctctgacacgccgtgccctggacccgaaatgcccgccccactcctggagcctccggtgtgtgagaggcacctttccttggggtcaggggcccggactctgaagccggcctggctttgcctgtgggccccgatcctcccagctcgagtccctcgccccagccgccgcgggccttcacctgtgctttggggacgacaggatggccaccctccttcccccaaagatttgagggttttgctccacgcgggagaaggtctgcctgtgccaccagccggcagcctttcacatgctgttgcgttacggggccctctgtgacctttccctaggccgaggggtgcttcgtctctgttcctgagagaccagaatttattcttggtttgtcaagccacatctgtaggaatgttgcccagttgcagcaggctggggtctgggacttgctcctttggcgaattgagaagtaaggatatagaaggcattttagcactaatggaaaccagaaccactcttagacctgggcaagaggggccccagaaattagcaagcgattagcaagcagctggatttcgatgacctccactgtacttagagcaacggcattcgattcgttggatcatttcaaagatgacatactgggttgtttgtttgtttctggcggtgtctaaagatggaacatcttgaagcatttt

SEQ ID NO: 70380 - DNA, 3187 bp, Homo sapiens
tagtgtcctttgattcagaaaagtttttaattttgacgaagtccaacttatctattttgttgttgttgcttgtccttttggtgttacatctaagaatccattgctaaatccaaggccatgaagatttacttctgttttcttctaagagttttatctttacagctctcacataaaacaaataatacttcagtgcaatatttcaaaaatcaaaactaatgcaaaaagtccatgatgaacaaaatagcattttaaataaaggccagatctgcccgtgcacttggttctacgcccttgattcgtgcaccctggggcgggggcaaattaaactaggggagcccattggactggggctggtgtgtggctgatggcagagttcaggccgggccagaccgggccagtccagagggagaagccgctactgcaggagacagagcgatttttccgctgcaaatccttgagaagggaggatggaggcggcgggacgacccagtgaagccggccccgaacgccaagtgagtgtgtgccgtgcgcgcgcgggtagctgccgaccgcaacgacataaacttgaaagtgaccgctgtcccggagctccctgctcccaagggacccgtcgcgttgcagagttgtccggtcgggcctctggggcgggcccggatcctggaccagggccagtctgtccgaaacccaccagtgagcgagcgggagagcgcggccgccccgccccgcccctttccgcgaccgccccgcccactcccaggaaggcccgggtgcccagagctcgcggtggactccgacccggcgcaacatggccgcagcctcgcctctgcgcgactgccaggtacacggaggctgcccccaaccaggtccccctcgggccccgggtcctgggggtggcccggtgctggcggaataacgggagacatggcccgggcgcggggcgtggggtgagccctgggcgcacgggcgcgtccgcggcaacgcctggaagggacccgaggcccttcttgtagagtccccaccgagggaaataagggacgcctgtcagggtactcgggagaccccaagacctcctaaaaaacgtagctcactgggcatggctggggacgcagggaagcccgcaaaggtaaggggctccttggaaccggcccaggactgggagcctgagcccattttacagatgaggaaggtggaggtcagaggggccaggagacgtgtgtgtgttgaagtttgaagggctcctggagagaaggcactgctattcccttcttgccgtctgtaggcctggaaggatgcgaggctcccgctctccaccacaagcaacgaagcctgcaagctgttcgatgccacgctgacccaggtatgcctgccgagagaggccgcggccccttctgtggaggtctaggggaaggttttttaattggggaaagctgtttttttgttttgttttgttttgttttgttttgtttttgaggcggagtctcgctctgtcgcccaggctggagtgcagtggcgctatttcggctcactgcaagctttgcctcccgggttcacgccattctcgtccctcagcctcccgagtagctgggactacaggcgcccgccactgccctcgactaattttttttgtattttttagtagagacggggtttcaccgtgttagccaggatggtctcgatctcctgacctcgtgatccgcccgcctcggcctcccaaagtgctgggattacaggcgtgagccaccgcgcccggccatggggaaagctttttaaattgcgccatgaccttagcaatagatggcagcacatctgtgcactttgtactggaggacgtgggagggtggggacatatctctgccccccccccacagcgtcctaaaagggcctctgcactctcccttcttccccaggactctgagtggtgggtggacagcggtgggtgcagtggggatgttttttgaggatgctggcctccccgggcctcccattgtggcctgctgagggtctgatgcagggctcggctgcttaggacgtgggatcctgtcctgggatgaatctgtgagtatactgccttcacctaggctgtgccaagaccttctgccacattaccagtcatttctctaccaatgaagggtcctatagttttagaactaggagaagtctcagaagtaagatccaactagcttccttgacaagtggggaaactgaggctcagagttgaacctacttgacttgaaggttgtccatgaattacaggcagaaccaggatgaacctgggcctaactgcactgatagaaacctaagctgaccttggcgtgggtggtgaggcccctgcatactgacttcatccacataacaggaggactcaggtagctcttagaagcctacgggctgaacaagagaggactgatggaatgctgtgagctgcgccatgggtgcctctcctgttcccagcctgccctgccaagggactctgctgtgggcatctgagttgtttgtttattttgtgtttgacctggctcacttgcccttcctgtatctcgccggcctctgtagagtactcgatttgttttttgtttgagacggagtcttgccctgtcacccaggctggagtgcaatggcgcagtcttgactcactgcaaactctgcctctcgggttcaagcgattgccctgcctcagcctccgaagtagctgggattataggcacgcaccatcatacccagctgattttttgtatctttagtagagacggggtttcaccatgttggtcaggatggtcacaaactcctgaccttgtgattcccctgccttggcctctcaaagtgctgggattacaggcgtgagccactgtgcccggcccctagtactcagtttgttacacaccacatccccaatcagtggcagctcatcctcccagcctgggtatattttgtcccgtgtattggtgtctctgtgctgtcctgtgttagaacttggcttctttaaatctctgtgccaaccctcctgtatcttgtcaaaatgcttgcgtagcttatagtctcagctatttgggaggctgaggcagggggattgcttgagcctgggcggttgagactgaagtgagctgtgattgtgccactgtactccatcctgggcaacagagcaaaccctgtcttaaaaaaaaaatacacgtactaattctgtgtagat

SEQ ID NO: 70381 - DNA, 1039 bp, Homo sapiens
gacccagaagtgcccgagccagcctggaaggcctctgccctgggccccgggtggctgtttgctgcacagctctccccacagcctgccccaaataaacagcttatcttcgtccctgaaaatggtgctctcgagttccatccttttcagagcgggtcctcccagactcctcttcctgcatcctcctccatcccgcttagtgacactttgccgtgggtggagcccctcatttgatcctcaagcccccgaggtgggtattatacctcgttcgcaggcaaaggctcaagcgaggtcagtcttaagttgctgcccactgacccgtctaccagtcctgtccttgcgtctccatggctcaggtcagggttatcctatctgcttcccacctctctccaacacatgcactccccaaggcaggctccatcaccgggccccagcccctggctctctcctccaacgcagctccccagccggcctgtaaaaccgaggacaggctcccgccacgccctcggcggtcctcaggccttggcggttggggaagcccgccaagggcgacggttcccctccagccccacaggctgtgcagctccggcaatgagtctccctcaggtctctgggtcagccggcgccccagtgcgtgcctcgggggcagggatcccggcttttcactactgttagtaacagctcgcgcgcgctgcttcacagcaggtgggtgagcctacttttagtcttcccatcgacacccttagatggcagttttaactttctccctacacacaaggagctgctatacatggttccggcttgacgcggatacctagtgacacttggcggccaggccgggcagacttccgggtgggtgatccctggcgctgtgcggagccattcgctgcgctgaagcagtgcgcatgcgcactggacgcttcttaccagcgtcctgactacaatacccaggacgcacccagcccgccgcctctcggagcccttttcaaaccgaccaatcggcaacccgcgtctcccggcgccgcgtttaaatccgtgccgg

SEQ ID NO: 70382 - DNA, 2069 bp, Homo sapiens
actttgggaggctgaggtgggcggatcccttgaggtcaggagtgagagaccagcctggcaaatacggtgaaaccccgtctctactaaaaatacaaaaattagctgggcttggtggcgggcgcctgtaatcgcagctactagggaggctgaggcaggagaatcgcttgaatcttggaggtgaaggttgcagtgagccgaggtcgcgcccactacactccagcctgcgacagagcaaaactccatctcaaaaaaatttaattaattaaaaattaaattaaattaaaatactgtaaaatacttcgatatctttcagggcctgccatctgtcatgtcggtatcctattgctacggagagtccgcctagacagtcttaagtctgttttgacgttaatgctggtccgaattccaaagggaggaggagggtctagtgaggcgggtcccacccggcctttcccatcagagcccgaactcgcggttcaggttccctctaggacgcccttggccgagaggaggcctccaatggctggctggggggcttagaattttatttttggtttacagcgcagaagaagagcagtgaggccggggcgcgggtggggagggcaaggcggcggctcaaaaaaaaagccagcccctcgcggcccgacagagtctcggcgccccgcgggtcggtggagcctcaggggtgagcgcaggccggagacaggggaacccgccgcgggacaggggaaggccggacggaacgcgggtaagctgccgcagcttccggccgggccactagcgcggaccctacggccggggcgggacttccggcaaggcgcggaagcggcggtagctgcagctggcgaagttgggcgactggcggatgcaggccttgcggcacgtcgtgtgcgccctgtccggcggcgtggacagcgccgtggccgcgctgctgctgaggcggagaggtgaggcgtccgaggctcccgccccccgccgagcgaatgtgtccccggaaacctgtccccgtccgtcgtggcgttgtgcacgtctcctccctccctgggccgctggttgcgcgcgggtcggcaggaggataccccgtcctctgactttggttcggaggctcctcgccctccacctgtgtagtcggaggtgtgcgcgactgcagctccgactacctgggagcagttccgcgcccctctccacccacgcgcgcccacccacagtgagaagccggcgggccggggtggggtggggagggaagggtttctcacggatctgcggcgtccacattcacctgtgagaccgtggacactggtgaggggagctgggatcgccgggccgggggcctgacctctgcacacgctgtggccgcccggtgggaggtccttgtcctccccactcagcagactggacaactgccgcgcggcgggtctgcttgttcagcgtctcctgtgttctccgctcgctggaggacaaagttttctccaggagcatttgcatttcttccggcatctaaacggagccccacgggtgcttagcattcctcgggcccggcgctgaaatgagcacttgtttaacttcacctgtgtggctccccgcgggaggcctcattcacagagtcacgtttgtggagctctgctttgcgccatctttggctcctgaccttgggcaagtgaattaagccgtcccctgtaaaattcggctaacacctgcctcacggggtgactggagggattagatgacatagtacatactgatgagtacgtgctcagcacatacgaggtacgcagaaaacagtagtggctattagtttatattgttaataaccatagctattatggtaggtacagtaagtgccaaagagaagggtaggcggaccataagcagaaatagttgtgaggaagggagagtggaggaaagcatcctagagatggaggtgctcagctgagtcgaaagaagagtaggatgtcactaagcagagacttggaggtggaggcggccctcccggcacagtcagcagtgcaagcagaatcacagaggcctgcaagtgtgggctggttctggccagatggagatggaaggag

SEQ ID NO: 70383 - DNA, 1114 bp, Homo sapiens
cccccgaaactgcctcaccaccgagcctgctatacgagctgcttgtttagatagaggaagaaatgctctgaagcacagttgtcactcccagccacagtgtgacaaaccagatccgcctgtccatgcagagcatcaaggtgacacttgggacaggagcaaccagcaggtgagacctggtctttctgtgccccttgccccaccctggcctaggctatgctcctccccactctccttatttaaatattgaagagatcccagctccctcctgtttaacaccctccagcacttcccactgccctctggaggagccagttaaccaggaccactgaggacagtcagggaagccctggatggccgggggaggcagcagccagtgaccagtgcctgcagctcagtctgaggctccccgggagttattttaagatcttgtacaagacagacctaagtgttaaacaaaacaaaccgaaacctgtttttaaagcaagtaggaaacgtgaactatctggatttagagtccaaagggcagaggcatcgcagagacctgctccgcctggacatcgaggtggcttttcgacaaagccatacgagcccctttctaggccatgttcttcatctcagcgtctctcacagtaagcacctaatctaggcaaggtatcgcctccctgtcacatcaggaagtggcggctgccaccccgcccaacctgcccccacctcagtggccctgggtggaggtgaaaaaggttcttcagggtcccttagagtaagggagatgagtcacatcagaacaccctagccaggagcctgcctggttggaggctggtcagtgacgttgctgtggagaccaggacggtccagcaagtgaccatggcactggccccaggtggctgctgggtgctgccctgggagcaacacccccccaccccagtgcctctggcctcagactgcgtctaatccccagaacccagggattacccaggaaaaggggttcttctttttgtgaataaaggtagatttttctcagtagggagcaaaccaactttctgattttaagcaaaatgtgtgctgaggaagtactgtttgttctactcactgattcactaattcattcatccac

SEQ ID NO: 70384 - DNA, 3951 bp, Homo sapiens
cccggcaccacgcccagctaatttttgtatttttagtagagattgggttttaccatgttggcaaggctggtcttcctgacctcaagtgatctgcctgcctcagcctcccaaagggatcctggtgggattacacgcatgagccactgcccttaaatcacttttgacaagagttgtattttcctggggatgtacacaagaatcacttgaacctgggaggtggaagttgcagtgagctgagattgtgccatctcactccagcctggattgacagagcgagactctcaaaaaaaaaaaaaaagaaagaaagaaagaaagggccccccatctcccaatagagtcaaagtgcttgggcctgccagtgaatcccacatctccacccacagcctgtgaccaggcacgttcctgaaagggcatctgtgaagcagaggtgggggtggtgaggaggagctagccagggtgcttggagtggccaggacaggactatggtagctgctccaagctgcggcccagacagtggggaggggagcagagtggccataccgggttttccgtctggttgatcccaatcacgaacaccagctgagagaggaagagcgccacggcgaggtgcttgtgaatgctgtgcaggttggagcgcagcatgcggaccaggctcaggaggacgaaggccaccagcagggctgccagtgacaaggacacagcggcataggtgacaatcttcagaggcaggacctccccgttctatgggcaggagggttaaaggcaggagagaaggtaagggccgaggctcagatctggtcattgcataacagagataaattacacacttgcttatgaaacgatcaaggctggcaggatcaggctgggctggggaggccgagtgctcatggctctgggcctggaactgcccctcctgaggctccttcaatgccctgggccctgggcatccctggggcctgcggcagcacgccaggctccctccactggcttgggggccgttcagagacctctggctttggggcgcccaggccatgggagcctcggactctcactccagcctcctttcttctgcctcaatttcagcttccttggcccacatgtcacctggcatcctggccatgagacaagccccaaccccgcccacatatgaacaaactccactaatcactgaccccgtctccaggctgggtcctgctggggagtgacatttgcccatgagacaggggcagaggcgggtcagcttcacctgcatattgcacaagaggccgctgccctcctccagccccgcctgagggctgactcacccttccaagaatgtgacagaaaccagggccacttcacatcaaaaagccctcggaaaggacagtggcctgggcccttgagccacagtgcaaccccggggaggggccgggggaggctacccaggcccctggttctgactcctagaccccagggtcccacacaggccatggccaggctggctcccacctccctcctgtctggataacgggaggccaggacagcgctcgggccattccccaattcatctgcagcccacaatggccggctcacattcccaggccgcttaaaatgccagaggttaaacattagccgcccagccttttgtcctgctgccctgcgtgtggccccgagggagagcgcccagcagctgtcacctcccttaggatcaaagcaggtggggagcggcaccgtccaacagacccgcactgaagtgaggggcaggttccgagagctcctcggagcctgagctttgggtctgccattccggggtttaatacataaccagggctctctgaaaacccttataatggggctttgttatggaaatcctcagactctggccaatcctcgaatatgtgttttaatcggttgatttgttttgttccaagcacttagaatggaagatttagtttgaggaggggacagatttgggggcaggctcagcaggtttgaggacgggcaggtttggcggggaggtgcaggtttgggggggaggggcaggtttggcggtaggcccagagggcacagtggccacgggaggatgcccacctcacgcctggagatatccatgagcaccgcaaagctggctgtgtggctgcactggcaggcgacatgtgtccggttcctggacaggagctcgcagccccgggcagaccaccctcccgtcccaccaacgctgcggagaggacagagaaggggcaggggtaagacggttccctctgcccatgagtctgtaaagggcagcctttgcccagccctgggggctcccaggccatcctggccaaaccaaacagcaggtgccgtgagtgctgaaagcccagcgccctcgcaggctgctccccaccgtgttcctcaccagccccctacaccgaagacaagagccacctggctgtaagaagagcagcctcactgccgcggaggcaggaccatgggaacagtctcccttcccttctgtgtctggtcagggcctccaaggagcaccctctgaagttcaagttctacgtgccatctagcagcaaaactcaaatggggctgtctcgcgtccgccccgctgctggaaccactgcccggggttcacacagctgcgatgcggtcccgtctccttctgagggcagacgctctcagaaaggacatctcaccttcctctgacactttcatcttcagattgcacaatgttttatgggaactgcccagaagccagggccccattatgactcccgttttactgatgggaagccccaaataacaaggtgttataaggtgtgtctcagcttcagacagggccctgccctcgcagactctgggaaaaatcacataacctctcagatccttactttgctaatctgtaaaatgggatgttagcattaatatgtttggcacaaactttacaatctgggaataataagtgcaacataaagcagagagcaggtcattagagctggagctaattgccaggacgcagatgaatgcccaagacagacagccgggcctgacgtccgtcgtggtggaatgggttcctttcttctctcttttataagccaagcgcctactacattccaggtgccatgctggttgcttattaactagaacttggaaagcacagaagcaggagaagaatgaggctgggctaaccgggctcgctcaccatagcgccacccccagcacagcccccactcacggctcctcactgtgcccagggcaactgtgatgggggcagcgttcctgctgcacagacgtccccagatgcacaacgctccgcagattcaagcctgactcctgcatggcgtctccccttcccggcactccctcccggtgtgtggggaggcagtgggtcttcccctccctgactgtgctcccatcccggcaacagggcccttcccaccacacccccgttccagtgccttcttctaaacagagacagcaaaagtgaaaaccaaccagcagagaaaaggcaagctccctgtaacgatagagcaactcaaatgtccacacctcacgtgaactctgcagctaaaaagcaaaaccaaagcacaaacactactggctcccagcagacgggagccacactgtggtgctgaatccagtctcacgtgtgggtgagaatcactcattttgcatttttctaacgacgaaacgcctttccctcgcttgcatggatgctagaacacagattctcgcgcacagattctcctgcgttcgccactctgtgactctctgacgctgcttctgaaacgggccagataaactgtgctgcggccaggtgtggcctcttgggggtgaagccagtccccacagctagactgtgtcagcctctcgggcaagaccgtcagcagatgggctcttaggccagtctctgggttctgtctcccgtgtgtgaccggaatgggcctgtcttatccggcggtgaactgggcactacactagtgttgg

SEQ ID NO: 70385 - DNA, 716 bp, Homo sapiens
gggtctggccatgctcctgctagacatggaaagacgaccgaggaaggtgagccaggcagctgtgcacagcagggctggaagggacgtgcccggtgcgttcgttatcagcatgcagggaaaccgtgccaactacgaacagcagcatgcccgggctcagctggaatgctagcgaaaacctcactcatcacgagaaaaggctgctcagcaccccaacggttcaaattcccctggccacaccagtgcgggccaggacagacagtgcactagtgacagatcaacgtccagaaaaaatgagcacgaattcttaattcatcacttggagttgggggtcacgaactgccctcattaatacaaagtctacccccgctatgtccagccagcttcatctgataagtgtaaccccaccacacccagccctggcaggccagaggtgcgtgattaacctggcccctggcccccaggagcaggacagaggcggctttgtctgtccacaccagagaaaaggcttgaaagtgctgaccggaagcgggtgagagagcagagaacactcgcccccgaggtcgtctgggtcactactctcagggcagaggctcaattcggactctccagcagctcccagcagccctgggtccagatcgtggccggttataaacagcagagactgccagacccccaccacagcgccgatggtgggacctgctcactacgcatgcctt

SEQ ID NO: 70386 - DNA, 1911 bp, Homo sapiens
cctccccggttcaagcgatcctcctgcctcagcctcctgagtagctgagatcactcccggctaatttttttgcatttttagtagagatgggatttcaccatgttggccaggctggtcgcaaactcctgacctcaagtgatccgccccgccttggcctcccagtgctgagattgccgcatcctaattatatcattgtatcttctttttaaagattaaaagacagacggcaacactggggttgcagagctcaggagccagtcctggccccctgcctcctccctcatgaggttcccctgatccccaggacatcggcttccacatctgcacatctgggagacaaatgcaccatcagggagggcaaatcatacctgggaagggcctgactccagcagtttcagcagtggctgaaagatcatggctatttttgccatcattacaatggaatgtccactccctccagccacctccacagcaatcaacaccggtgtccagccactctacatggacgtgtggggaacagagcacaggcctcttggcttggctgtggtcaccgggagggagcagggagggacagctgccaagaggatgggggagggagcctgctactcaggaacgctggggcaagacatgagacaaagggctgccttcacccaccagtaggagcctgaccctgagcccaaagaaactgcccacctgtgtgctgaccccagggcctgaggacaggtccccaagtggacgtctcaaagagagtcccacattccagggcacatgggaactatggccttctggcagctggagggcagcaggaagggcacagctgtctgagacccgtgtggcttcccagaaagaggtgccacccctgaggaggcaccggtgctcacggactcctggttgccagtcttgccagggcaaaaaggcaagcgaaggaaaccctctcttcgtggggcactctgccttgcagtgtcaggtgagatcccggggggaaagctggcttgagctcctctggaatgtgcagggaggactccgtcaggcccggctctgcctccaagctgggcagcaggcgagccccagagctccaccagccccactggcagaggagggccctcacgaggcaggagcccatgattcatgccctgctggaatttgtcgagcatgccgagatttgcagctcctccgagattgggtcctgccctgatcaaaagaaaagaagatggatgaggacactataaataggccagagccacccagctggcctcggggatgcaggcggtatgtgttctgggctctcacgaagctaagaaactctaaatccaaggtgacatcgtggcacaccgccacctgcttcagggggacacaggggacaaggaggagctattggcagagcgctcggttcctgcaagttccaacttctgctaaaattggttaattggttcctttgcatgattcagggcacacaggcttctctgtccacaaaatttgctcgcctgcacacccagagaaatggacttggcttggtttttctgaacttttgcctctgcggaatcagcagtggacgtgtgagctggggcctctgtccctgtcatgtgaggaggtcaggcaggacaagcaggaagcactgggcaatgagtcaggaggcctggtggggagcttgggtgagtctgttttcctctctggacctcagtcttctcctctggttgatgtaataaaatcctacaaactgagtctttttttttttttttgagacagagtcttactctctcacccaggctggagtgcagtaacatgatctcagctcactgcaaccttcatctcccgggttcaagcaattctcctgcctcagcctcctgagtagctgggattacaggcatgcaccaccatgcccggctaatttttgtatttttagtagagaca

SEQ ID NO: 70387 - DNA, 1133 bp, Homo sapiens
tgacgcgcacctgtagtcccagctactcgggaggctgaggcaggagaatggcgtgaacccgggaggcggagcttgcagtgatccgagatagcgccattgcactgcagcctgggcgacagagcaagactccgcctcagaaaaaaaaaaaaaaaaagaagtagctcagcacagcatgtggcgggtgccacccaagaaggtggcacagaggacaaaagtccacagaggacaaatgcagccagtgtggaaatcaggccccaacttgcggggccgaggccgtgagcagccacaaggtggccccagtgagcttagggaccagctagtgcagggcaggtgggaggttcacgcacagctaaattaggctaagagagacgtggcagggtctccctggggcagcaggtgggggctcagctcaccctggctcccggctgcacagctcagagtgggcacctcctcgcctgaggagaaggaagggccgcctgtagccagcaggtgtgccagcatcctcctacctgggctggggcccggaaggcgaacacagggcaaccgaacccattgcagagcagggcctgagggctggcttgggagcaggtggttggagtctggctctgaacaggccttgatccgtcccttgggtcccccaggcccttcccagcctccaccccgtgctgcaggccacacctacagccttctgtgccgagggctgtgcccctggaagccacgtggggcagactggagctgcctgggtcctggagcagcatttctggggcttcagcccaggggagctgactggatttgcggctacactcacaccacactcctcctccgggctgggccgggtgagaggagggagatgaaggagggcgggcctgcccttgctggtcatcagggtcgctcatctctggggatctggctggagctaggaattgaggaaggacaggctggtggcaggggccggggctgggcttctggcgggccaggcccccctctagggaggtctgtgctcactgcatccctagggacacaagcccagggccagggcctcatgctttctggcctggcaggctgcctgcctcagccccaccccacccaaggcatccagggacactggcctgtggcagacacgcccacagctt

SEQ ID NO: 70388 - DNA, 3810 bp, Homo sapiens
actgccagtcacagcaccctggcctctgcccccgcagtccccttggctcaagcgtggcacatgaccaagcagggcgatgagaatccttccaggagacttggtggaggggtgtggggcaggagggggtctctctttgggatcgctgctgtgaggatggaggctttttctccactgggagaagcagagaggttcggagatgagaggtgagaagcagcaggtgtcctgctggcagagagactgccactgctgcatccgcacaaacaggttgcctttggggcttggctgaggtgagtcatttgtgtacaaaatgacccggacaatgacacagcctggccaaggtcttgaaatgtggggacagcagcgagggactcgcacaggaaagctctgggcctttgctcccaggagcagctcacctgggctgtcagggagagtggagagaggagacaggaaggagcacaatcaacaatgaaaacgattaaaatgtggtcacagtgctggggcaggaggtgccctaagggccccccccctcccccagagccttggcaggtggagtccgggttcatttctgaccaggctggctcagggcttcctggagtgggcagctctggagctgggcctggcaggctgggtagagttagtgtagggcaggtacccctgggaggatatggccagagtagggagcggtaggcaggaaagtagagcttgtgtttgggaaaaacaaatcctgtttccctggaggacagagataaggcaggaaagcctggagggtttggacagcggggagggggagccagagaggtctggcggtcaggcctggtgctggatgggggctctgggcacaaatgtgagtcatctccgccatcctggaaagagacggtcctgcagacagcgcgccatcgcaccccatgctgcctgcggaggcacaggacagacgccactgggcagcccttgcggaagcgctggatcctttaccctgaaatcactgggtccccagttctgcagacaggaacctgagccttggagaagtacagctcacctgagtgcctgcctctaacccaggtccatcagggctagacctggagggggatcaaagagaggccctgaatcttgccacagggagcttcaggtgcacttgagctggggcccttgagacagaaggaagtggggagggcggatccaggtctggagtctttggattgaaaggttggagatgcctgtgggactcccaaggtcagtgagttgagggcagggcactggggcaggcaagagacacaggaagggcggggcagagcacaggggacccagtctggggagggggaggcagagagggctgggcaaaaacagcctccaggccttgtctattttctccactccggttctcctccaccctcccaccccaactcctcgcaaccatcctcctgggtaagacactaaagcgtgtcccctaaacctagggttctgcagggtgatcccctctgccccttcactgagcagtctcctgtgagctagacagccttaaagcggggtggtgggtggtttttctagagggtccaaaacccggggataggtgggcttagagtgggtcccctctacgggtgtcctgccccgcaggtagtgcctggggagatgcaggggtgtgggtgagattcagagaaagggtgggcccagaggtccagatcctggggacagacagcaccccgggcaccttgggatgggcgcgccaggtactgcgcgagtctagcggggttcgtgctgcgtcccgtacagcgcgggctgcaggtccagccccggcgtggggccgcgtccggcgccccgcgaggcggtcgaggaaaggcatttccacccgggacgcgggtttccaccggcagcccagtccctgacccatctctagaaaggcgggcggtcccgcggggcgcgggcgaggccacagcagcgagcgtgctcccgcgggtgagcccgtggcgtccgccgtggcaagcgcgcggacggcgtggccgtggccggcggcggccgcgcgtgcgcgtgggtgcgagcggcgggggcgcacgtggccacccaaacaaaggccgcgccgcgtgaccgagctggcgcacgcggacccgccagggcaggcgcgcccccgcggacccccgagccggccgcggggcgggggcggggccggggtggcgcgcggggcgcggcccctttaaggtgcggcgcggggcggggcggcggctgcgcaacggggccgggggcgcgcagactccgcgcagcgggacgcgagcgcgcgacctggcgccgccgccgcctccgcgctcgtggccgggacccgcggggccgcctcctcccggctccccggcgccgctgggctcccgggcgggcggcaggcgtagcgcggccgggcggccggcgaggggggcgccgcggcgggtggatgagagttggccccgatatccgctcagggtaagcggcgcgcgcggacacccacctaccccgacctggttgccccgcgaccactctcccttttgggctggcggctcgcgacccagctcactcggccgcgctctccccgccgccgccgccgccgcccgggcccgagccggcgaccctccgagcagggccctgcgcgggcgcgccccgcacacgcccccgggtcccgcgcgtcacggctgctccccgcgggcacctgcggccgcaggtccgggttctgcccgccggctgggggagacgaggacatcccggggttgcggggcccggactggggtgggggtcgccggaccgggggtcaccgacgctgggccactggagggggacggtatcggcccgggcccgccaatgtcgtcctgccgatccactcccgggtgggacgggagaggaggagggcgccccagcccctgcttccctacagacgacctctccaaaaagttgtgggcgcttgtcccctccgtgcaccccactttctgccctgtcttctctccctttgttcgggatgttgagctcatggggctctgctggggcgggctggcaccttggctgtagcccaggcccgtgcgcctgccagaacgtggggtgcagtgtggcaaccccggcccgaggccccacatgtctagagcaggacctgcacccctgccaggtcctggacaagggagggaggagagccagtttgttctcagccgggtgggctggtgcccctgccctgttggctgtgtggcagaaggtgcagcagtgccccggggccagggacctgagtgtgactcccccagagccaagtccactttttcggctattgtcaaccctgcatctcctgaggtaggaaagattcggtttgggggagaccttttgcaggatggggttcccttcttgcctgccttgtgtgggttaggaagaaaattcagaggtgtctctcctacatgccaaaaaggaggtgcctgagtcccagcccagtgcagccctgccctggtgctgggcctgggagggaggtcagggtcagggctctgttgcctcagaagtcgagggcagcactcgagagaggagtctgggacttgcctccctcaccctcctgctctgtgaccttgggcaaggtagtgagcctcctgggcctcagtttcctcactagcaagtgggcaggggcaggtaagaggatcgaatggggtgatgtgggcctcctcaggctgggctcgccctgggttggggttcaaaatgggtttaggaggtcagtcatggcctctgccccgggcgctgtggctgagcctgaagtctgaagtctgtcttcctgacttttgtgtcccaggcccatttggggatgcacagtctggccagggtgtgtgttca

SEQ ID NO: 70389 - DNA, 650 bp, Homo sapiens
accctgctgtgtgtggttctcacagctgactctatggtggaattcttgttattacgctcctgtgtgtccagagccagtcacttgtgaaccacatggagcccccatttgtgacaggcaggggcttacgaccggggtgcacaggtcacttccttctgggtgtcgtgcccagccagggtcttttccatgctgtgtaccagacagccagtgcctttgccagaaggattgtcatctgggtgccctgtccttggttaccagtgctctcatgtctgtgcgctcacctggtgctcaagggtccaaggcctgtccacacagccttgtggattcacctggcaacaggccagagcgtgatagtgagcctgtgtatgtacagcactggactgtgtgtgtgcttagatggcgtaatgaactctgtgtgctcatgtttgtgtggctatggttaacggtgtgtgcgtgagtgtgtgtgtgtgtgtgtgtgtgtgtgtatgtacagtggtggttaactctgtgtatgcatgtgtgtgagtagttaaccacggtagtagttaaccgtgtgtatgtagacagtggtagttaaccctgtgcgtgcctgtgtgcctgtgtgcagcggtggttaaccctgtgtgtgtgtgcacgtgtgtggtggttaaccc

SEQ ID NO: 70390 - DNA, 1893 bp, Homo sapiens
tgcatggatggatggatggatggatggatggatggatgcatggatggatggatggatggatggatggatggatggatggatggatggataggtagacaaatgaaccaataggctgtttcctccaccaggcatactcttttgcatatactttaaggccttactggccaccttccagagctccagatgcaccaccttgctcccattctgtctggtgtttggtcccagatgcagttttatctgtgccacctttgcttcctagtgctttggggcctagagtcaccagctggaactggagttggggagtgtccctgattgcccctagcccacactcagcagggagcaggtgcttggcagagagcctgttgctgtgggaagggactgggggcctggagggcttggctgctgggtgccaagcgcttggttggaaagggaggttgtgggggcgagggatggcacgtgctgtcgagcacacgactctcctggctccgtgctgggccggagccccagagtccagcccacaggctgtcagatgccgcgtgcctctcacagggagaggcaggcgtcggtttctgaaaaccagctgctctgggtgaaaaccctggctgggatcctagttcttcttatttgacgtggtaaaaatgtcagtacattatctgtccaccttagatcctgcattggtgtcctgaaatgtacctaaaacggtggttggccagctatgtgctcagcagccttcaacattaggatgtgacgcacttggaagcttgctccttcctggttatcagccaagacagtgttgacagttgatcgttcagtaaacattatctctgcacatagcggtaaatgacaccgcaataaataaatgttagggagaaaatgcaggcaaaacttcacaataaaagcgaggcatttcttggaattctctgttttccctgagcagggagggccacgggaggaaggggttaaaagggctgcctctgtgctggtggctgtagatgaagccgtactctgggctctgcagtgtaacttgcagcctggtgattcgatggagggagtgcctgtcttctagaaagttcctgtggtgatggcaggagggctgaattgggctgggagagttcaggtgagagtccgggggaggtggccaggtggggcctctgggtgtgcgggcctccggggatgcgggactccgccaggccaggagcagctttttgggtggattctgagttcgcgcccctggcctggtgggaaggagttttatttaaagattatcacttgatttttatttttgggtgaggctgggcctgttgaatcagtcgtgtgccaagaggactcctgcctgagagatctacttttacaggtttaaaaatagccgcagaactgctttccttcctcccagtaacttccctgtgcgctgagtgtcgaggctgggtggagggctgcgtgtcgaggctgggtggagggctgcgtgtcgaggctgggtggagggctgggcgtcgaggctgggaggagggctgagcattgaggctgggtggagggctgagcattgaggctgggtggacggctgggcctcagccccacagtctgggcctgtgtaggcctgagccgatgcatctcctttgcctcccctcaaatcagcgtggccgttcactcatcagagaacgttctgggggttgccccggagtgaccagtgaggtggttgtccctgcccttctcctcgcagatgctggggaggcgtgaaggctggagcaggtgggtgcacaaccagcctggctgtcccagggcttcctttagcctctgtgggggcgatttctatgtgccatgtgtcgccacgccaggctcttgtcctgtcccgggggctcctagtctgtggctgattctgcttcattccttggagag

SEQ ID NO: 70391 - DNA, 1820 bp, Homo sapiens
aagacaggtgcagggggtcttgggagagcaggtgccccgtgctgccattaggatgcgctgtggcaggtcatgcatttgtgggccacgtgggtgactctggaacacctcctccatccgtgctgttcactgcgggggtttagagaggctcggtgtgcacttttctggtggggccgccttggtggcggcactggggaatcctgcttcaggtgcctttgagggcggagctggaggtgggggggagagagacggagctaggggctgccagggacgctgtactcctttagggctcctggacccactaaaggagggcttccagtggttttatgacccaaggactgccaggggcaggaaagtccacgccgggccaggtggaaggaagaggactgtcccagcctgcctaggcacttggttcctttgcttgacacgattgtctcgagggagagtgtggttggcacactcatggccccacagagtgtccatgtccccccagcctgtgaatgtggcctcccatggcagaagggactttgtagatgtggatgagtcgccgacctttggtggagatggttctggattatctgggggcgcacagtcaccacaaaggttctgagaaggagatggcaggaaggtcagaggaggccatgtgagggtggggttagaggtcacagtgacgtcattgctccctgggggccgcaagccaaggagcacaggagcctcaggaagctggaaaggcaggaaatgggtctcccccttcccggagcctgcagaaggaacagccctgcccacgccatgagctcagcccagggagacccaggctggacttctgaccccagaactgtaagagaatacgtttgtgttgttttaagccactgtgttggtggtgagccatgggaaacaaatgcagaggtcaccaaggggctccgtggcctgccctgtgtgtggcctcgctcccacccccaccctgcaggacaccttggccctgacctgcagggcagggaggcctgtgggtggggcagcccggcgtcctcagtgtctgtgagcagctcggggcacaaggaggcccactccggaggccgagggaacccagagcctcagcagcagctgcagattttcggtgcctggacaggggccggggctggacgagaggaatctgccgtgtgaatagcagctcagtagtttgctccgggctggaaatcggccctcctgtttcttttcttactcgggaaagagaaagaaaaattgatgatgggggatttgcatctcctttgtcctgtggaaagatacagctgtgctcggcacactgcagttgacctgaatgtgtcgctggtgggcaggaggcaggccggtgcgatggagtcgtggggcgtgtgatcatcatttcagtttcgggagagacagcagcttggccttgcagggagccgtgtgctcagagataggaaggactcatgggagagcagcggtcagacgctccagctggtttcgtttacttagctgtctttgtaccatcaggaacgacactgggcaaaggtgggaagcctcatggctcttccggaagctgggacaggctgatttgccacgctgtccgaggagccctgtctgcaaggctgagggggccgtgccgcccgctgccccgggagccaggcatcctttgggctctgagcagcgagcatggcggggctctggcgttcacatggcgtcctctgggctctgagcagtgaagatggccgggctctggcgttcacatttgtcagggctctgcagagagcctgaccccaggaggtccagggtggaaagaggggcggctgcctgagacccctttgacc

SEQ ID NO: 70392 - DNA, 1260 bp, Homo sapiens
ttaaactgagccacgcgcagtggcctcccatccagcaggagggcccacgggtttcccgtgtgtcacggggcactgagtgtctgccagtgacatgggtgcacgtgtgtgggcacgctcatggcagggcagggtcaaggtggcagaacatgccgctccagacctcacgcagccgtcgggaggccccagatgtctttcgcctcttgggcatatgcaacgagaacaagagcgagttcccagctaagagcacaggggagcacagcggtccctgggactctccctaatgcaagctgccacgtgaggaccggcagagggaacagggtgagagagcaggccgctgcccactgcgcccactggagcagtgccaagtacagtgtggaagtctgtggatcacacccacacacactgcaggggatgctgaggcccagaagtggcacgggccacactgacctccacatgcccggcccgcttagagtccaagcagtaagggtcaccccagaggaagaacacccaagagatccgagtggctgggaggcctgattccccctgcaatgacatgcaatgcaaacgcatttccctggcaacccgccgctcagtaaacatgagctgtgtgaacatctgatcttcattaaaaattaaaggtgagtgcttgcctatgccaaggaagaccaaaaaccagccctgcccaccactgccagggagagtccagaaatctcacgtgcaggaaactcagagatggtcaaactgtcccccgcccctccccgcccaccacgtccaccctgacacagcccttgatgggtctgatacacagatggaaggtgggggaagccagaacccacgtgacgcccacaggtcagccctgagctgcgacttatccagacgcgactgcgtgtccccagcccttgcctccgctgcggctgctgctgtcatacagggatgcgcccaagtttcgtcttttatgggaaaccttctgattgtaaaacattagctacaattttaaaaggaagagaaaaactcaccatgcaaatctaacaaagaaaaaaatctgtggccaaatttagcccaaagacctctgctctgcaacccagtgaggctgagccgtggtttttctgaccgcacggatgatgaagaaaatctcacagcaagcccccagagttcatgatgctgggataaggtacctgccaatcataacttactgctatttcatgccataaaatgtgacctttgacccttgtcagcacaccattagtagccaccaatgtc

SEQ ID NO: 70393 - DNA, 1564 bp, Homo sapiens
aaactttgagacaataacaacctaccccagaaaaaaacgggcccagccctccaaccaagcccaagtggccaactagcagcttagacttccacccttgagaggctgtgagcaggcaccccacaacctctgccagggctgtacaggggaggccacgcaggaagctggaacccccatcagcgccagctggtaaaaagcctcatgcccactaggcattggtggagacaaaggggcagcccagcccgggcccccaccctgcactggcgaggtgccccttcctccttgctggagtggagtaagaggaggcctggtggggagacagggctttcactgccactgagctgcaaggtgcccacactccacccacgtgctgttaggggagtgcatgtggggagcggcaaggaagcacctccaccccccgccaaggtggccttagcagaggcctggcgggagctgtaccccccacccacccggcaatgacaagcagcccctgactccgctgccaacaaggctgaggggaacctgggcttccacccccacctggcagtaccagcgccgttccctgctggagcagtgccagagaaaccagctaaacagaaggtgtaaacgctgcccagtcttggaacatactgcaaaataaccagtgctaggtgagtctgggaaggagggctgggccttggtgaggctgaggatagaggaaaacatgtcaggcagggagggcagagggcacctggggaggcacagggcatgcgggagataatgacggctgggctggtgagcacgtgtgccccgggagcaggtgggggcagggccagatcgggggaggtcaggaatgcaagccaggccacaggcacgcatgggcgagcagtgcctggaagaactttgtagcagggcagggtgtctaaacatcaatggggcacacaggctggctgtcaggacgggccaacggcactggagaagggattagtgaccctcagggtgctctctaaacttccaatccccatcatccagggttcagccgccggggtgctccctaaagaaattcaaaaggcagcaggaggggtcgggaggggaagaccggggccagctggaggcagaagtcatctgacccagtctgtggcaaaaaggggaccaaggtcagcgagaaaggagagaagaggtatgggatccggacagccgaatcgagaacccagcagacgtgtgggatccggacagccgaatcgagaacccagcaggcggtgagggtgggccactggcctaggagagaggccgagtagctggagcttgtatgcgggtgacaggctggctgtctccaggacagaggagaactcgtgcctggaagtccacgctgggctaatcgctgaagccattaagttgagatgcatcctggaccagctacaggttcctgagataaccctcaaaaggcaggactcagctgcatttctcatagaaaacgctgttatgcaaaaatctagactgttagagaagaaaaataaattgggtgggggggacgggaagtaaaacacattaggagtttcttaaacacacagaaagtgtatcttctcga

SEQ ID NO: 70394 - DNA, 2478 bp, Homo sapiens
gcctgggcaacagagcaacactccgactcaaaaaaaaaaaaaaacaaaaaacaaacaaaaaacaacaaaaaacaaaaacaaaccctctgtcctcctgcagggctctctccagggtgggctatgcgtcctccatgtttaccaaagtcactcttctcctcatccggagggcctctgcggggcaagtagccaacccgtggcacggaaaccaattcccccatcccgagcagggagcacaccccacagaaagtcaggggccccttctttaacttcttaacaggaagtcctcaccctgcaagggcgcctctcaggtttcggatccctgctaaagaaaagcatctgttcttggagtaaactgcaatgcgcgcggtggggagcgcctggcaccccccctcgggatccatccacagtccgtcttgtccagaggtgccctgcggacagaccgcaccgggggccacgaccccgcgccccgggtcccacctccccgcggggatggggcgccggcctcccctccactgcgcggcgctttgtcctcgggttcccggagcagacggcggcgcacagcccggcccctggccccggcctccctcccgcctgccccgacccctccctggcgcctgcgctcccagggcccccggccttaccacagccgctcgctccctgcacccggtccccccagccgggtcccccaagccgcccccgctccctggccaggtccggccgaacccgggcggcggcgacactcacccgcgccgggggcgccggctccgggccccgggctccgccaccagcgcagcagagcccgcgcgggctccaggctcacggcgcagcgctgctgcttcacccacagcacggattgcagcggctccgccgcccccgtcgcccccatctccgccgccgggctcgtccgccaggctgggggcgcgcggacgccgaggggcgccggaccgttagcggcccctgcagtggcccgggcggcgggcggcgggcggcgggaggcggcgctgcgtcaccccgtacgcgggcggcggggaccgcggaggggacgggcggggcgggggcgaggaggaggcgtgggtagaggaggggccgggagccagggagagacggggggacccgagaaggggagaagagggaggaggaaggggccgggatggggctggccgaggccagggcgctggggccgggaggcggctgcctttctctcctctcttctccggcgggtgccgggtgctgaatctggcgctcccgcggccggccgggactcagtggcgccttccgcgcgggcctcggttcaggcggggtccgggcggcgtggaaacgcagtcctggcgatcgggcgcggcggggggcgggcctggatgggggcgccacgggcgacgtgaccttgggcggcgggtgccctctacgatcctggcgtcctgtcggcctgggagggggcctgcagctgggccccgacaggcaggtaaggctttcaggaggcggaggtctttttagggggcgggggcgctggccctttgaactgctctggggcctgaagccacagagcagacagctgagcagccgcccccgagctggccctaggaaccggagcctgggccccagacttggagagacacggcccctgtggccccaattcaccgcctccccaggaaggcctccttgaccccacagctgaaggaatcaccagcctgcagggactccagccctgccttcagagcacgccgtgcgccttcatgcaagctccagtctctgcgtccgcagtgcttaacacagccccataggaagcagccacaacctggttcggagggcacatccctccctgatttatcagtgaagactgtgctcacagaggttaagtcacttgcccaagagcacagggctccagtgtggcagagcctaggctcacactgacactgcctggatgtgacactgaggtctgaggcctgcccctcccctcggctcccctacccagccctgctgctgcaggcagaggtgaggtgggctaggtccacgtggccttgctgctgtgcctggcaccaggtggcagcatatacaggtcttaccctgccagctccttgtgactgtcttgtctatagggcgggaaccagccatgaatcattcctccctgggagcccagcccctgttcaggccatgcagtgaaggccccaggacagtcctgcagccaccgtgggcccagtcagagtcctagcaggcagtacctgatcgtggcacacagtggggtgtgcagcagcgaggcctgcccagcctcctccctccctcagctgccgctctgaggcctgggaaatgtggatctgaaacttacttggaaagaaaagctcatgccagtggcaggagggtgccgctgcatgcgaagagggttggcaggcaagggtggcatgggcaggggcccgagagcaccagcgtccctactggggaccccttccctgggcctccctgtgcttaggctccccgtgcccc

SEQ ID NO: 70395 - DNA, 961 bp, Homo sapiens
gaggaaagagcagctccaccccagagcagccgtcaggtccctgctgtgtgtcagacccagggggcccttcaggagctggctgcgaaggacacaggagctttgaaaatgtagacgaggccagccctggctgcctgaggacctcccggtacctcacccacctcttccctggcaggcacctttcccaccttagaccctgcccaaaatgcccttcccacacgtctgcctgggaggcccccactcaccttctccttcaaaccacatcttgtttcttctgccacagagtcccctgatagctcactgcatggcacttccacccccggctgccacagggcctcacttctccttgtggcacttcagaacaactgatgccccaacctgttgctagcctgctgtgtacatggctggtcagctctgcacagggccctgagctgccaggtaggccagagagcatgggctcagccccagcagcctggagttctggtcctaattagtcaggccctgacctgccacctgaccctgtcttgtgtccagtctgcaggcttgggttgctgcctggtggcctgatggccctggagcctgctaagccagacatcctgcccagcggcggccagcacccgttcccctgggcggccaggttgtcccacccatgggccacctggctcctgaggttctgtctaagctggtccaaccccatacccacgagtgtcccacccactgggtcatccataccacgggccccggcccctcctgtccacggagccctggccaccagcaggagcctggcaccagcagccccgtctaacatggtccccgccatggcctctgatctattcttcccttctcttcctgggcccctggccttgtttgctgtgccagtccttccagcttatctcccgagactccctgtctcgtgaagtcagcaccaccatctgacatcagaaactagaatgctgggttgggt

SEQ ID NO: 70396 - DNA, 942 bp, Homo sapiens
ctagagtgcagtggcgcaatctcggctcactgcaacctctgcctcctgggctcaaatgattctcctgtctcagcctcccgagtagctgggattacaggcacccaccaccacgcccagctaattttttgtatttttagtagagatggggttttgccatgttggccaggctagtttcgaactcctgacctcaggtgatccgcctgcctcagcctcccaaagcgctgggattacaggcgtgcaccactgcgcccagccaaaaaatttttttaaaggtaatgatagatatattgtcatacagattgatgaatacacaacagcattgtgtatattcacaggccccaaacagcaaagacacaaaaccataaaggaatggacacgaatgcaaccgtgcatgggagggcttggcagatgcgttgggatcccagcacagccagggcagaggccaggaaccacaccttagtgcacagaggcccaaggctcaaagtccagggtactgtgctcacccaggatgcaggagtaggcagtcaccacatgggatccacagccccaggtcagtggtaaagcaggggagagtctggtgaagggagggaccaaggtaacagggccagagaaagttgctgaccactggtggccaggccaggccacatatccaagtcctgtcctccaggctttgttctgttaaaaacagctttattgaaatatggccgggcacggtagctcacgcttgtaatcccagcactttgggaggttgaggcaagaggatctcttgaggtcaagagttcaagaccagcctggccaacatagcaaaaccctgtctctactaaaaatacaaaaattagctgggcgtggtggcctgcacctgtaatcccagctacttgggaggcttaggcatgagaattgcttgaacccgggaggcggaggttgcagtgagccaagatcgtg

SEQ ID NO: 70397 - DNA, 3495 bp, Homo sapiens
ctggcagggagctgagggacctctgtggtcaggctgcttcactggccaaccagggaccttgtgccattcccatcccattgctgcccccagcttgccctgaaagcacacttgggggtggtaggaagccaggtgtctctcagtgtctgtcctggtgacgatgggacctagaacgtgcttccccacccaaatccctcccacattcaaagggaagcctgggtctcagcggtcagggaccaagcagctgggcttcgccgccagtgactgcttagggggtaggaagtggggtggcctttctcgggactgccccgctaacctgcccctgtagctcctgcaacagcctcccaagaaccagggctgagaggagagcctcccagaggccactgcttcgcttgtgccttcacccccttccctccccaaggtggccgctctctcgccccagcatctcctctgtcctctctccttcctccccaccgggggctgcttaccgtcaagagtggaggggtgacagaaacagcattggctggggagtcaggggagctagggctgagtctagctctgtcttaaatatattgctagtttctaggcctcagtttgcccacccacaaaatgggagtattggaggcaggaatctaaggtgcccacctgctctcatactccaaggctccttgggcacatcctgagtccgccgtttcccacagacacagccgactgcctgctgctttctctgtacgttttgtgacttccctgggagcaacatggaggaagggccaagttttgaggtacacagagcttgctttatctcatgaaggaaaaaaagttccatgctttaatcttcctcttccagtaaagaaacagcctgaagtggcctgtctgcgagtcacagtgttaactcagatccacaggaagatgttcaccggatgctccttggccaggctgccatcatccactcgggggtaaacagtctccgaatcagggctggctggcggctgacagccagggcaggaagtctgcagggcaagctgcaggatgtcacccgaaggaaatattttgtgttgtgcattgcggtggagaagtgcaatgaggcttaggggttgtgaaaacagattcctcaagccttcacggaggacctctgtgctggaggtctcacccaacaggtcttgcaggctggtctcagagaagttcctagagctgcgtgtggagtcacccagccttctcccccattcaatacggatcccagacatttgtgggatacttgcatctccctatagcactttcccatgtatcgtctcatctgatctttagaagaaccctcctaggcatgcaggacagtgctgattacctcattttacagatgggaaggtgatgctcagagagggggctgggatgtgtccatgtcacatggaattggggccaactgacccttggccagctctttggctgcatgtggcatttccagatttccagtgggtgatatgaggcttgtgactcagaggggtgccccagagatgaagggagaggaggcgtggggcagctctggggtaactgccttgcaggggatgaagggagaggaggcgtggggcagctctggggaaactgactcgcaggggtgccccggagatgaagggagaagaggcgtggggcagctctggggtaactgccttgcaggggatgaagggagaagaggcgtgggccagctctggggaaactaactctcaggatgtgcgtcaggggctttcccaggcgtccagtggcatccagcatggtatggggctagggtcatgggggcagggcgtcaggaggctggcactcctgccgtgggtggatggcatgaggaaaggaggcttcaggcatcttcctgcatgggagaaacaacgcctagtcccttaacaagtccctgaatccttcagctgctagcactccccagcccattgtctgtgcccactagagcccgtgtgggtggtgattctgccctgtaggagctccccatgggagtggaggggaaaggccaagttccccaaagacaatgtcagtttatactcagggaggggcccacaggaggtagcaggccctggaatctgggggctggaagtctggagctgggcgtggggtgaggtgtttgcctgggcctcaaagcatgcagtgatttcagtgagtgagggtgcagggtgagggacggctcccaggcagagggcaccagcaacagacacgctggagtgtgttgagggacagagtactgggcagtggcaaaagaggagcccccaacctggagaggccttgggtaccagagtgaggagtccgccgtttcccacagacacaggcagcccctgatggctcttgagcagaatgttttacgatgggaggtgctgggcagcagtcattggggagggccatggggagaggccagcaggggaccagggccccctctcttggctctaacagccccgctgtgccatgggcaggatgcctggcaggtccaattccaggcatggccgaggccagcagccatggaagagtgtctggggtcagtggctgacaggagtgaacgaggaaacgaggaaatggggcagggcggggagggcgtggcacgcactccaccaggccccaacaggtgcccagtctgccacgcacccctggccttggcctggtgcctgatagctgcccctgctaggacatgggggtgtcgcccagctctgacagctctgggaatgaatcctgggctaagagccacgagtcctcttcagggttcagctgctccgctgaggcttaaaccaaaaggtcatcagctcccgttcagcctccctctcccctgcttcctccttcctcctccctccttctccagctcttcttcctccttcctctcctcctcaggctccctcccttctcccttgatctttagaagaatcctgggagaggggcaggacagtggcagttatctccctctgacacagggggaaggtgagacccagagaggggctgggacttacccaggccactttccctgctccctgcttcccacgccataccaaatcacactgcgcactgggaacagtatacacgagaaccttgggccctcctaagtggagctgcttttcctagaattgccatcaacatttctaaacaatgtggcccatctgggggcaaagcctcctcctttgggaatgacccctgccacagtgagggcctgaccctttgcagaccattgcagtccgctggcttgactctgccttctggcaacagagctgggggaaggcccaggaaggatcaagagggttccaggccctggagccctatctccccacttccctcaggttacatccagtgcacttgccaagtatgtcatcaatgaccaagtgaggaccccgggaagctcggtggggaaggcggggggctatgacctactggaaattcccatagccagagtgatggggatgaaggagaggtgctggtttgggacacagcctgctgcagggactcgcagagccaaggacagagcag

SEQ ID NO: 70398 - DNA, 2583 bp, Homo sapiens
caggcaccaggaacactttaagtttgggccttgggccttcccaagtggagacgctgcctaggggtcaaaacgtgtgaagggagaggggtgtgggaagccggggtaaccagaggactgagcctgctccagcagatacacacaggggttaccacaccaacgtgtggcccttgagggctccctggcttagcacagcccctcacccctctagccctgccccctgcccctcaggcccctagcgcccctgggcccaacactgggtcccatgcctcccccacccccatccccaggccccgctcttgcttcccgcaagtcctgccccacgcccctgggagcctctgcttcagtgaggatgggtccttctccacagtgacagaggggatggagatgtggcaggagttccttggaaggtgccatagggcatcacttcatgccagctgtggcttggtcccttgcgtaggggagtaggggggaggggctgcctttggatccattgccagcgagcttaactcctccagaatggcatgtctccccaccccttgcagtgtccccaggacacctgggtgggcagccaccatccctcctttggaagaaccagtgtcatccgaaggtggtcaggaagtgggaggatgatgccgagtggccagtacagaccctacagggccagattcctgaattttatttttgtttggatcgctaagcgtcagtactataaacagcagttagccctggctggattctgtcatgtgcccaggttcatgcccgattgcattgagccctctgccagcaggtgaggaaacaggctcagctgagaaggctgcccagatttgcacagcaggattgaaatccatgtctgtctggttccaaagtcaggggttcatccaccttaccactcggcctgacccgcaggctcttaggattgaggcccagagaaacgaggtgtttgcagtgtctcaaaataagagaccactccccccagtctctctttccatccagtgccacactgtgccaggcaggccatgccaccagaacccaggagtgtcccctccccaccaaagtggccttctgcaactgcagggggctcagcttggaaccaggatgccaaaccgtgcacaatcccagcagaagtgtggtgccagcaccttgcctgccttctcccctcaccctcaggatgtccatgcctgggatgccacatgggcaggccctttagtgccagcctccccacgccatgcacctctgggtctatgtccacccaaaagtgccattcaggctggggccgcaacacactttccatcctggccgccaggctctgatgtcataagggcacagagttcccaggtctgtgtccccagttcctagcagtcagatatctggcccagtcagatatctgggagatgcctgctctccgggccactttctcttctggtgttaagtgacagaccagctccttccttcactctagcagctgcgggaagtccagggatgacacagcaccatggggccatagggccttccggttgccactccaggccaggcttcacgtcacttacagactcactccctactctgcggtgtcatatttgctcagagattttggtttacaaactgccttccagtcctttgtctcaggggattcccatcatgactctgggaaacacacagggcaggtgtcctcatctccattttacaggtgggaaaacgggggctggccgtgtttacagcagagtgtgatcagtcacaggagacatgaggccaggatgcagcttgcagacggccagtctgggctccctctgatgtctgctgtcctctctctatcctgcctgagtcactttgggttggactgtccatgagtcacggccgactgtggctcctgcacgtttgccaagggggtggggaccacgtgctgcaaaggaccatgggaggaaatgccacagctggttgtgtttccgattagcagtgggactgtggccagggcccggcaaggtgaactggacagtgagtgggctgtggggtcagcagctggactccaaaccctgttcccttcactctagctgggggactttgcctcttgaagcccctactttctcatctttaaaatacaaatcatgatacccactgtgtgcgccatcccctccccacccccactgccaccccctccctccccaccgctgggcatctggtgaggggggatgaggaggatgctgaggatgctggaatttgctgagcttgagaggtggagagggttgcagatgcacacgggaaagggactgagaggcctgcaggtgaggtctgggcaggaggtctgcaggagcatggcagaggatcaaaggtgatggaaggggctgatggtggctgtgaagggtgcgatgcatctccagggtgcatttaggaggcttgtttgcatgagccgtggcataatggccctcctctgtctaccctgaaagcctccgaaaatcagtcttattcttcaaagcatttggatttgcatttgttgtttttcctggatgtgaaaataattgatcaatttttggggggtgggggtgtctttttaattttttttttctttttttgcatctaagaaagcat

SEQ ID NO: 70399 - DNA, 1108 bp, Homo sapiens
cttagtgtcaggaaatggcacgttgctagtccctgtaatataaaaatggctgaaaggagttggggaagggggcagtgaagacgacgcctgcctctcgcggtgtgaaactggggacctttgctatatgccgtctattattgtggtaggctgaataatgaacccctgaagatataccaggacttaatcctgggacctgcaaatgttaccttaaatggccaaagggagtttgcaggtgtgattgagctaagggccgggtgatggggagatcagcctggaccggattatccagtgggcctgacgtgaggtcagagggatctaggaggaatcggaaggagagaagatgatgtgatgatggcagtagagattagagtgatctgctttccagacagaggaaggagtgtcggccaaggaatgttaagtggcctctagaagctgaaaaaggtaagaaactgactctcccctagaacctccagaagggggcagccttgctgacgctttgagtttagtgcagtgaagtgctaagactttggacttctgacctccaggattgtaggagggtaaatgtgtattgttttcagccgctaagtctgcagcattctgccaacagcagccttaggaaaccaatacagatagaacagtcagctttttactttggggcacaggctcggtgcctatggacggtacagcaccaggaaacttaggaggcagaacccaccaagtgggagtgtggcagctcactcagtaaggtcctgtgagagatattctaagcccggagcaggccatctgaaagcaaagaaagcagaaaacacttcccgaggaacccaaatggcattgcaaatccagccatcctgaaatactatcccaatttttttttgtttgtttttttgaggcagggtctcactgttttctaggctggagtgcagttgtgtgatcctagctcactgctgccttgaacttctgggctcaagtgatcctcctgcctcagtctcctaagtagctaggactaagagtgtttaccaccatgactggctaaaagaaaaaaaaaaaagtttcacagagatggggtctccctatgttgcccaggctagtgttgatctcctggtctcaa

SEQ ID NO: 70400 - DNA, 2705 bp, Homo sapiens
cactaagtgctgccagtttttcctctgtcaattgtttcagttcttccttcctttccccttccatcaggttaatcctgctgtcacctcgctcactggttcttgcaataagccagactgagctggaaagaaccgccatggtcctcagtgttgtctgtaggggacctcactgtctgaggctgtcagggctctgtcaggaggagacccctggggccttctgagccctactaggagaggattctaggagagtaggacgccttgcacatagtaagtactaagtcaatgttacttaccagtaaatgaagaggcatgggaaattgttattatttttgagacggagtttcgctctgtcgcccagcctggagtgcagtggcacgatctgggctcactgcaagctctgcctcacgggttcacgctattctcctgcctcagcctccagggaaattcttaatcagaaaatatgtcttagatttttgttttaaaagagaactggcaggagctccaaatacactaaagctccagtctgaaatgacagtccctgagcattcaatctttggtctaagaagcacagaaatgtaatgcaaaccagacacggtttttttagtgattttctgcacacacacacacacacacacacacacacagtaaaaagatctagtcataacgtgtgcacctgcagttccaactactggggagggtgaggcaggaggatcactagagggcaggagttcgagactagcctgggcaacatagcaagacacccacccccagtcccccccggaaaaaaagaataaaaaaggtaaaaataattttaaaaagagtaaaaggaatgtaaaaataattttaatgcattttatttaatccaatacattaaaaatgttacctaacatgcaaacaatatacaaattattttatacgacgtctttggaatcctgtattttacacgtaaagcgcatctcactccggactagccaggtttcaagcacgtgatagccgcacaaggctggaacccaggcctggggaattaattcttgtcctcggtgctcaaaccattcttcccttcaagcctggcctaatccccagtctctctcatctcttcgaatacgctccgcggttatgcccctcacctcactgcactgcaaatatttcgtccactgagtatttgctgatcgtcactcagtgccgggtgacccagcttgaccagcacccgcagccgccctgccactgttgggccgggtatggtgtgtctggcttccctctgttctgggccggctccgaaacgcgctcaagagaaatcggaatcagacacggggcagttcagctttggaaatgaggagctcgaggctcctgggagtccgttgcgggcaggtgggcgccgctgttgtgtcgggagagccaggagcgacagactcaaactcagaaacccaaccacctccgctccctccgcgatgcgtgtaacgtgcgttgcgcggcgtcgccctttaataacgacgggcgctcggagtgctgcgtcactcgccaccagggacttaggcgggacttccgggcgcgcgtaggcacaacttccggaaggaggcggaagagcttctcggctctaggctctggagtcccgggagcagtgaggggccacccggggcacaggaaagggccgctaggggagggccgggtgcactcggggtgtctgggccgcgggtctgagggatgaggaggggccatggccagcgacggggccaggaagcaattctggaagcgcagcaacagcaagctcccgggcaggtgggtgtgccgcggagggccaggtcggggtcaggggtcagaggtcaggtggccgcgttggcctcctgggctgcgggtggagtcgggggtctggagagggcaacttggactctgaggagactgctggatggtgtgacgggcgttggggggctcggaggtcggagcgtggggtctgggggtgacagtggctgcacgtaggatcgaggcttgcaaggacgaggaggagctattggcgtttttcctgacactggcaggcttctttccgagaaactcctgggctccttggggaggctggaaggaactgattcgggtcatgctgtgaagtttggtggagtccggaagctggccgggctgaggccccccgtctgctgggtggatcagtttctgcagggggtgtggtgtttttgacccacttgatttgcctgtggtctcttgagggctgcggctcttgccttgagcatagaagaggactagagtttccctgtgagtttccatgtttctgcttgctggtgtcaaaaccacctcctatgttgtgttagcaggaagttttttttttttttttttttttttttttttttttcttcggctggaatgacctgggtacaccctagatgctatacagctccagagctccagagtccttgtctgattgctgtggcgctgagctatgccagggccctagggaatgagacattacgtggagggtacctaggataaaatcagccactggtgaaaacagatcagagataagcaaacgtcaagatttcagaacatagttctgttccaaagctgaagtctggaatgctgaaaattatgaattgtgttacgaagataagtctgagtagaatcattcataaacacagtaaaatggtttgtactcctgtttcataataaatattattgtttgagtgtttgaatgataaactttggaa

SEQ ID NO: 70401 - DNA, 1398 bp, Homo sapiens
cgtgttggccaggctggtcccgaactcctgacctcaggtgatccgcccaccttggcctcccaaagtgctgggattacaggtgtgagccactgcacccggcgggctagacactgtacatgcaaccacacgtgtagtcctcatagcagctgggggtggtaccgtgtggtccctattttacaaatgaggaaactcagaagctgagctacgtgctcaaagccacacagctcataagtggcaaagctggggtttgaaccttagaagtctgtgcccttacccatcacagcctcatccttatctcctccattccctaggggacttaacaggtgttgaaattattacagagaaagctgactcactcaccaggaatctgatcctgctgtgggctggcttgggtggaggtgttcctcccgcccccgcacccatcctcctgtttgaactcaggctgctgcctgctgggcctgcctgcccttggagccctgctgagctcagcctgaggcctggctcctccaggctgggggaaaaccaggcttgctgtgctcggcagcagagattcttctggagtgaggtgagcagcttgttctaggtcccccctggtgttctctttgcagacaagaggcagaggtatcaggaggcccagagggaacagggctgcctgggctcttcccatttctgggccccgtgctgtggggaactttcattttgagtatccccagactttttgttccccctttctgaaatgtttcctcttttctggtgataaacatggaaattccaccccgagtgctgcggttcatgaaggggcacgtaggccctttgagtccagttgcttagaatacctgtgggtttccttattaagtaggaagtagaggctgagaacgtctgtgttgttactgatggcagccccccggggcagggccaggcattgctgggcgccctctcctccctgagtctgccttccgtaaacggcctgcagtggggaaggtgggcctctgctcaaggccccgagctcctaggggaacgggttcaccttcaggcccatccaaggcagagccctttccggcttcggggcccctgatatttctgggcccccgactgcatccgctctgttcccacgggtccctcctgggtgttcttgctcatgcttgggttcatttgagcgctgcctcgccctccgccatcctcttccttctcatgtgcgctgtgtgcaccggagcccggccgatgctgatagaatttttaagtgtgccgtgcagctttctgcacctgggcctctactccttgctgtgctggtttgaaatgggccttcttttatcaaacatttttactaaactaaaaaataaaataggcttgctggctctaaggctttcacctagatgaggcgagtgatgtttattgcag

SEQ ID NO: 70402 - DNA, 829 bp, Homo sapiens
ggggtgaggctggggcagaggggcaggcccacagggcagagcacagtcaccagtgtgactcttcctgcgcgagttgcttccaggcacacgcagtgcccatgtggactgccgtggccaggctctgtggaacgcacttgctttcagttcctctggtggaattcctgctgaatccacgtccttcctttccctatctcatctttgtggagtgccactctggctaggtgtttgctagacgctggagctctcgggaggaccggaatgtggccttggtcatgagattgcttcattgaggggacaaacctgtatcacacagttatgactggtgtcactgtggcactctaagagccagaggtgcaacgcctggcttggccaggaggtggcgagtggcgcacgcggatgggccgccaggagccacgcaggagccatgcaggggccatataggagcttgcagcagccgggccttcacgctcaagcccagggcagggagagggtttccgggcagaagcagcggttcaaagggcatggctgaagctgtgttctcgaggcgggggagggctcttggaaggtctcctggctagaaggacacagctctgagtagagttctcagagtgggtggttgtttcttccttatgtttgtttttttttgaaacagcaacacttgcatgtgttataacatgacacagcacagcagggtgtatgtgaaaatgaggcctgtcccagcccccaccttcccttcctttccacagctcgaggtgtctccttccagcgatggcccatgcatctgttgttttaaacgtttcgtgttgatgcaattcaaacttgcagaaca

SEQ ID NO: 70403 - DNA, 1985 bp, Homo sapiens
tacttattttaaataatgtcttttcccatgacactaactttctttgaaaacatgattgttcatggctttataatagttatcaaaatacattcatttcttccatttgcttgtaggtgaaacatttctgaagacattctattatttgggtgtttaagttgtttccagttttgtttttgatgttgttttttatttattgtaattactaacctgtgagacacacccctgagacataactcttgaacacttccttgtgtatttccatggcgtgagccctggggcgaggactcggtgttaaacagagctgtgcggcggtcgcttgttcactcgtgttgtcttgcttgtccctgcggttccctgctggccccatgcagtttgatagccgctgttgacttaattactctttgcccttcgtttcctctgtatcagtgtttttgaattgaagtgcccctgggcacagagtcctttatttggacctttggatgttttctcgctcagagtacgcaatcctacttcccctgtgtttgatttgccaaggtttttctgcttcagactttctaaattcttcagaggattggtgggcagttctaacaagacggtgcccatttctctttctaatttattcacttgtttgctcactcatgaattcagtcatttgctcattgatttgttcactcatttactcggaaaatgtttcttaagcatctgcctggtgctgggcactgacgatacaaagatgtatttgtgagtggtgctccctgccctgtagcagctcatccatgttgagagaccaggcaaaacaggaaaattccagctttatggcaaggtgaaggaaggggatgggtgcctggacctccgtggatggggcttgtttggctggtgggaggatggaagatggagggagagggcctgcgtggaggggaggcctgctggtgggtcgggggtgagtggagataatcggctggagcccgtggggtatacctgcgtgcgccatgggcaggtaggtcccactgcagccttggggagggctctggggaacgagaagcagattggattttaccctgcaggtggtgtcatttccctgcctacagttctttaacaatcacactcacacccttgggatagggtcccaagcctctggccctctggctgctgcgagtgtcctgggagcctgccctggacctcctgctgcggccggccgcctgcctgcctgctcttggcggcagctcctcctctgcctgcggtgctgtccctgagcctccccactggaagctgtctgtggcccatgtgcctcgttcccccacactttggtttggagggtatcacaggggcgggattgggcttggtgccgggcctggctcagggccatgcttggtaatgatttggtaaactgaagagtaagctctgcctggagctgtgtttactctttcccttatctcagccaaaaactgtccttttcaagaaatttactgcctttctctaagcactgaatgaagttattctttccaataagattaggtaaattctgtggaggacttgaaggagaaccagtcccatcagaagtcagcccaagaatagtaccatctcaacagcagtagattttattggggcacattgtgtgtgaggctctttgctttaggcagtggagtgaggtggggaacagtacagggaagttagccacgtggtagatgacaggatgagtcatgattctttttttttcttttttgggcttttcagagccttttgatgcttatgcatattatcaatccccatgaccaaaataagataggccacatttcctaacatttgtctacagagctgcttattcacaggccactttaacatttcacggtcgtggtggtctacaggaagcgggtagagcttgtgaaaactgaaaaccttattcatggggtcattccctctgattgaacctcattcaaagggtcattccctctgattccctaattatcagatcttaacatctgaat

SEQ ID NO: 70404 - DNA, 1082 bp, Homo sapiens
gggttcagcacagcacatcgcctagtggagcatttgtccagcacctttcctgacattcctgatgcctccacgtgcatattccttcctatttgtaaccagaagctgcctgaaattacacatacacacaccccaactttcaaatagaagaagaagttaaagctagagaagttattttgaaaaactctgttatgttaatgatagcaattaagggtcacgaagcctagactcccataactcgagaaaagctgccaggcaacaagcatctgtggctctctcatggtcctgtagtggaagcagagacagagcagccactatcccttgctgcggtttgggctccagggtcctgcagaaagaacaccttccaaaaggctcatttaactctatcacatgatcagggaaaccagtttccctcctggctgtctgtggaagtgaaaccttgttgaaatctgccaaaggctggagaggaaaagaacaaacttatttctcaggcctcctgtactttgccctctgacattccgctttccacaaacagattggtgaggagcacacaattcagtagataaacgataacaatcatcttttggattggtggttttctcttgccccctattttcacctgagaagaaacacagcctttttcagaaagttaattattccattttgaaagcctgagggtgatgggggtgtagtatgtttctaggtgtacctgcactattttggggaccttatggagtgccagtggtgttcccgagggagtaccgtgggcagctcctggctggattgattcccacctctgttgcaggacagtgcccggcccataccaagttcatcctgtgtgttgagtgcagtggcgtgatcgaccgagtgagtgaggaactcaggcctagggatttgctggctcccatttgggctctgccatttctggttgctatgagcctcccatcactgtgcttgactttcatctcccaagtcacccagcaatacctgtggcatctgtccaaatactggtggtggtctcaccgaacccacaccaggtcatacctctgaaatctttgcctaacatccatctcccaacctccatt

SEQ ID NO: 70405 - DNA, 2900 bp, Homo sapiens
ttttctatttgcttttcttgccatctttatcttctcgaaaggaaaaacaaaatggcacaggcaaggctttttgacccagtgaatgggtgagtttgcagactttttatttctcatgatccaagtaaggatttgtagttttcatgatcaaaattaaattttctctttgcagataactaaggaatctactttaccttgaaattttaagtaccagggaaaaaggacatgagagttatgtgtttatcaaaagtggagacactcaagtgcgtagcagaaggcactgggctttggagtcctggaaacctcggttacattctcagccttcgtgctctggggtgtgtggtacgcgtgggcacgcaccctttctcagtgccgtaaactcgggccagtgggagtagtgagtatcttggagggttgttaggaaagttaaagactccagtgtgcagttggctgtcagcaaattgcagctcctttcacttgccagagagagcaggagtctctcaccatcccccaaatcgtctatactactcttggggaagactcttcttttttaggactcacttcataagacggcaaggactctgccattgcagtcccttggcagtagtgatggagtcctgagggtgaggcgcgtccatgctctagcccggggacacgtcacccacttccaggaagggtctgctctaagtctgtctcctctctggttcagtgcagggcaatgcgtgccgcccccgctcagcgttgcctcgagtgttggtgttacgctgctggagagggagcagctcatgtgaaatatggtctgcccacccttcgcctgtccaggggccctccctgggctcaggggccatcagcgtgtggtggccacagcgttttcacaaggccagcttgcctggtgaagggagagggtggggaggggaggtgagtctcctttagaaagctgtttgatatcatggttagaggtttggtggtttcagttaacttgattttctgttcaataggggcctgggtgtgctgggcttcctctgagtgtctcatcatgcaggttttcagggtgagtcatctgtgtgtcaggcacagctggtcactgatatgactccccaagcaatgaaggcatcagtaggtttcgaaagtggccttaagaaggtacaagtaatattacctctgatgtcagccaagcagagtagagtccaacattagcaccttctctcctgtagctcacattcagagggctgggacgaagcccctgtatttcagcaaattagaaactttggttgaacattcaggactctaagtgatatcctggagtacatgagaaaaaatgggaattcttgttaaaaagtgagtcaaaaaaattataatcctgaagttgcctctgggttactgagttcgcacagtgaattcagatgcacccccactcccccgcagcccctgtcacaagggccgtatgggcagtttgaaaatacagttagaaaccatgaagcttcagaaagttcttggaaaatgaccagtcattaaatggattcaaagctcgaagtttgggtgacatttctccctgtgattccgtctcgcccccctcctttccgagtctaggagtcttgcagcggtcacttccccaggcggctctgctgctgtgctatgggccgtctgtgggctggaaccagttagacttcctccctgtccttctatcccattctcttcctcaaagatgcccgtgtctctgtagcctttgctgtcgcgctgtctcctgggccctcctctgaactctgaacccatgtctctgtagcctttgctgttgtgctgtctcctggcccctcctctgaactctgaccccgtgtctctgtagcctttgctgtcgcgctgtctcctggcccctcctctgaactctgaacccatgactctgtagcctttgctgttgtgctgtctcctggcccctcctctgaactctgaagcgctgtgcttatgcaactgtttgctgtcacttgatcactgtcagcattggattattctgtcctcatcagcttttgagttaatgccaggctctgagtgcctcatcctcagcactgttccaccttagtggagaatttattaggtgccagagggtgccgggcatgtgctggtcaccttgacactcatggttctttccttgagttgtcccctcacctgtgatggctgtagggacttgttgcctttgcgctgtgattgggtgaggcctgggagcctcagtgtggtgggtcctcctggggccaggctcctcgcggttctgcacgccctcttcctggggccaggctcctcgcagttctgcacgccctcgtcctggggccaggctcctcgtggttctgcatgccctcgtggctccccgcacagcctccctgctggggagctttcaggattcctccagaagcaactcagaatatacaggcagtgccccaaacagtacatagcacatctctttaatgaactgtgcccgctggggcctggggccagggccggcattcccatcctcctttgatgatctccattaccaaacaattttggcggacagcctgacaagcggagcgtgagacagactcatggtaattatggatctttctgtcggattctggacaagggctgtcagttaaccgctcaggctctgcaatggagccctgaacaaaagaatcaggtgtgaacgggagcctcactctgcgaggacacacagcccagtagggcagaaagttattcttgagtatttaccaggctggcaaggagcagtatttaccctgctcttcgtaagccacactgacctagtctgcagcagttttaaagtttttaactcaaagtaaaaacaaaactactcaccaaaaagcaaactcacaaaaataaacgaatgagactagtcttggggactgaaaattgtttcaaaa

SEQ ID NO: 70406 - DNA, 1918 bp, Homo sapiens
aaagagaagttccaggctggatgaggccctctcaggcttttaggggattattcttgcacttttgccagtcttttcatttcactaacagcactcatgccaaggttgtcggttcgctattacttcttgaattacagcttccatatttgcctaccctgaagtcatactgctactcttaggttcactactgaacaggacaatttctttgagtagaaaagaaccattgccttttataattagtcatttacatttcctttccttggggaagaattattgaattccaagaactgtttggtggcatggaggtaataggaatattggggaaagtgactaaattatctcagaacttgtcagagaaaaggccagaaacgcagtggcgtcatgactcctttagagaaaggtcaggaaacggccaggcccatgactcggggtggagtggactctgcctgtgagcaggtattgcccttcaggtggggctggcgtgagttgaccattgatgttaataccagggaggcgacagggtagttgggggaagccctgtcctgcacactaagctggggagatgtgtggcttcttacagtgcttgctcccagagggggccagccaaaggcagttgaggggggagcctccgccatgagttcaggagcctctgccatgagctcaggcagctggaacttagaatggactaagccccggggatgttgttatctgaaagagaataacaaaggaaggactggtctgatgcccaggaagttggcagagagaaagcgcactccagctgagctctgatttggcatttgttgtatacgtcaagaagcagagtcttcacctggacggggcagtggagcgcttggtggaggcctggggtgggggaatgaatgcctggagcgccgagtccgtttagatgtgtcaaatccacacctgccccagatgccggctcaactgtgcccctgtggggaagaatctcagatacatgatttcagagccccagtcaataaaattgaggactcctgccaagattttagaaaggtttattaaacagaaaagaatgtgttagtcactgggctctgacagaaggttcattaagaatgaatcattgagcagcaagcaatttaaaaatgaaaattaaaaaattcaatttacagtagctttgaaaaccctaagaatccgtgtcgttgcctgaatgaatagttgattccttttaattactaagtaatactccaccgtgtgaatctatcacagtttatccatcctcctgttggtggcagccgaggctgtttctggtcttgggctgttgtgaataacatttctgtgaacactcatgtccacatcttcttctagtggcctgttaagttctggctgttccacgtcagaatgcgatttctccaacactgcgttccccacagggtcttcatttattccgattctgatagcaatcctttgtcaagacagatattttgagaatgtttgcttctgtggcttgtcacttcatttcattaacaatgtcttctatgagccaacagtttcaactttgataaaatcgaatttatcattttttttcttttgtggtaatagttttctgtgtcctgcctacctccacaatgccaacatatacccatgttatgattgataattttagttttttggttttaggtctacaacctagcttgacttaatttctgtatatggtgtaaggaagatgtcaggcttcattttttcctctacagatatcctggtgaacataatgccatttgttgaaaacagttttgtcctatttcacttttgctgaaaattagatgattgtataggtgtgtgtctgtttcgggacacactgttttgtcccattgacgtacaaatggatcttaatccagttcacactgtcttcattactgcagattttcatgggttgggtaaggccagt

SEQ ID NO: 70407 - DNA, 502 bp, Homo sapiens
agttcagtatagtttatgtctttctcttatactatatggctttaaaaggcttatttcagttagagagtgttcatacattggaccagaatcccaggaccaagggacagaccctgtagatcattcccttcccctgatcagcccccgaggctgtagagaggagaacccgtcctgtgactcactagatttgattggctgtgacctttgtctttaaccagttggaatgttctcaagacctggacagacacatgccgataagaatctggcaaaagagaacatgggtggcatagagctaatggatgagtcactgaggccggctgggtagcaacaggctcatttaggctttaggatttggctgtgccatgaaatgtgatgtacagctcttactacagcccatgccgtaaacgtggggatgttggcgtgaattttaaaatggctgtgctctgcattatgggctggtaattgtgaaacacagtggtctggtgatgaatatttcaaaggaaat

SEQ ID NO: 70408 - DNA, 1867 bp, Homo sapiens
acacctgtaatcccagcactttgggaggccaaggccggcagatcacgaggtcgagagatcaagaccatcccagccaacatggtgaaaccctgtctctactaaaaatacaaaaattagctgggcgtggtagcacgtgcctgtaatcccagctacttgggaggctgaggcaggagaatcacttgaacctgggaggcggaggttgcagtgagccgagattgtgccactgcactgcagcctggtgacagagtgagactccgtctcagtaaacaaacaaaaaaacaaaaaaccgtaagaggctgttaacttttgagtttcgtggcactcacgaagtgggtggtgaccctaggatcctgagggttatggcatacaaatctagccattttcctgtcaccttacattcctagaggaaggctcagcagagggtgtttgaaactgaaagatgagaggggcaggcctggggctgttcccaagtattaatgccccaagcctacacctttttaaaaaacaaaaatttttatttaatcaaagctatgtgttatatattagaggaaattttgagagactttgaccaaaaaagagcagccctccatcccagcctcctcacaccgccagaggcgccgctcagcctttcaggttgctgtgtctactgttttcttgttttttcctctctctctgtctctctcaatgctgttcttaatttctgaggtttagaaatgcatttgtacagcggaagagggaagctgagaattaggcttccttaccctgtggtcccagcacacggccatgccctcgtgcccggcccttccttctgaggctcctggggtggtgtgcctggacttgtcacctgggtggggctgtgtcagcgtcactgccgctgagtcaccacgtgcactgtgcctgtcatccctttctgggacagcatgtcactttccttggtgtcaccaatcatctcccttaggagtctgtgaaccacccactccctccctccccaccagacaggttaccggagcgggcgtgtctggaggagcaggcagagcaggtgctgtacacctcgtgtcctctgggacccatcccttctaggcccctcctcaggacaccccctcctgccgggctccccccaagcgcagcccccttcccaaacccacgtttgcctcactgtcttccttgtccggtagagcacacccctcagcacttctctgtgtgaatgagcctggcagggacctaccttgagatctacatgtctggataccgctgccttctggcctctctctggatggagggtggagggtggaggtggaagccacttcctcgcaggcttcgcgggaatttgctctcctctcttacagtgtccagcattgcttctgagagattcgctgccatgtgactctaggcctgtgtttgcaccttttcgttccttccccaacacctctgccctgagtgtggtggtgacatgtcttttcctcatcttgctggagcagtctgtgggaccctgcggtctgcaaaactcaaggttttcatctctaagatttttctgtgggaaatgtcctgagaattaaattccctgccatatttgtttccggagtacctactagaaggtgggcttcctggatagccccttatttccgaccttatctttgcattgctataaaggaacaccctggcctgggtaatttataaaggaaagaggtgtatttggctcagggtttagcaggctgtacgagcatggctgcagcatctgctcagcttctggggaggcttcaggaagcttttccttatggtgagaggcacggggagccggcgtgtcacgtggcgagagagggagcaagaggggaggggtgccacgctctttacaccaccagctctgtcc

SEQ ID NO: 70409 - DNA, 1206 bp, Homo sapiens
ggacttagaattcaaggccccaggtgagcctcgcggccggtctccctctgcctcttgggaaggtggagggtggaagcctcagggtgggcttgctttctttgctagcttaggtgctcgggtgggaagggcaccaggttgttcaggccacgtggctgagatcatgcctgcacgttggtaactgtggaattgattttgaatgcagagagtttggcattcattgaggattagccaattgattgccattcgtgtgcagaaaaggttatctctttctagggactctggggccctgtgtgtttactctccctctccataggaacgctgactatggacagtccctgagacacacccatcctccccagagctgttgccctggagcctctgcaaactttgctgatcgtttacattgtacttaaggccatggtgggtggtgctggagtttggtctacagcggctcacagactgcccaggctcatagatgccaatgcagaagtgcgtcaaaagcagcccgaaggaataattggtttggtaaacatttgagccacactatctggccccgggaggctcgagctccagccccacccacggagcctccacctccgcacagcctggaatccctccaggacccactcaaggcctcctcctggaagagcctccaaatccagaggacgttccctccttgcagggaacttggcagggaggtccctgtggggcacctgctgagcgaagttcacctcgtttctgttgtcatcttcctccccctccgtgagtgacagatgaatgacaagagtagcaatgacaatagctgcccccactgcaggcttcctatacggaggccctgcctgtgtgatctccagtctttccagcttctcagcaagtgggcttcaggacccccattttccaaaaggaaaagcaaaacagccctggccttcagagcagctgaatgaggaacttgtccagggtcatgcagctcagcccagaaggtgtcagagatcagattacaaaaccctggaatttctgctacatcccagaacttccaaagccagtcttagatttcctggaacagggaaaactgtaataaatatctgcaatgtagccttttgcgtgcatgtcggtcttgcccagggtgagttgcggttcactgagtgatggtcccacgtcggggtaccatgacctgtactgagcatctgccagtcacttcatcctcag

SEQ ID NO: 70410 - DNA, 1147 bp, Homo sapiens
gctggctggatcctgcgggctgcagctccatcccaagggacctggcacggggagaaacaaagttcagggtgcattccagaaggatccacagggctcagcagacagtgctgggagtggggagcagccagatgtacggacgcctccccttccccaccccactctggccgctggacgtacagaacccggaaaatgcagcccctgtgatgtagttataccagccttccctggccagacccctggcttccagcctgccccggtcacagccaagttcacccttacaggagacagcggccgaccccggagcccttggtaaagcaaaacaagccaatgaaacagacgtctgggttttcaggacatccatgtatcatcagcgtgttctcccccagctctcaaaggaagtgccgaccacagctaatgaggccaatgattgtattcggaaggtggagtcacgcacaaacggagagaagcagaggccaccgctgcagggcccgaggggtggctcccaggcccaggcagagccggcaggaagcgtggccccgtcaccatcacagcattcaggcgagattgtgcaatggtgtgcaatggaacttggactctgaccgagaacggggcagggaatccacatctgatcctgggggtcacctttttcagttgggatttggggcagaggccactttgcttcctgagcctgagggaaaaggagcctccagcgctgctcctgtccccggtgagaaagcagcaggaagggaagggccccctgcgcttgggtggtgggagcccagggcaggcggcaagtctcaccctccctttcagcaaacctgcccaacagcaagtaagacacccaccgcgagctggaagaacccgcctgaagtcacaccataggaaagggccctggtctcagacagagcttctgttcctgaggtcccctgcctgccgggcgacgcttgctgcagcccgggaagcgcgtcttccattgctctgtgctgagcacagccgcggtgcggggcctgggttgggcctgtctgccacgcctgctcataccccagccctgcgctggagccagggtccacagggagaaggggaagcacagggcaccccaagcatgtcgctggatactcaggcttcagagccctctaactttctcaga

SEQ ID NO: 70411 - DNA, 1641 bp, Homo sapiens
ctcctgagcctgggtggacgtgctcgggtgctataatgggagcaaaaacggatgcaacaggctgaagagcagtttgggagcctcaggtgaagatgctgagacccagggaggcagtttcccggaaacaacctaaatgcccagcagcaggtattcgcagaatgtgtgttatatttgcacgaagcaatgccatcaatatttaaaatgaattaactcaatctacatgaatatctatgtacaagcataaaacccaacgcgtgttgagcaaaatgggcaagttgcaaaagggaagatgacatagttccatttacagtaagtcttaaaacaatgaaaatcaatagtacatgttgtttattatatacacatacattatagaaatacaaagtatgaatgtgagacacagaagtgaattttaagaggcaggaaaaggagttatatcagataaacaaaaaacgatggcatttaactaaattataatatattttttatttttaaaaatgctttgaaagaaataggaaagtgtccctagcagacctggatgcatgttgttatattatcttcccatgcttggaatatgctgctaaacattaacttcgcatgcgtcattcacagcgtaatcgcaaatgccaagtgcctggcccagaaaaagcactgggcaagagttgtttctcatctctgtcattcaatgagctaatcaatcaccaactcagccaaatgtcgttttgcaattgcctctgtttttaattttcctcttgtcatgtagtaatttcacattcttaatcttatttatcaattttaagaggcatgaaaggatccctgtcatttgaccccaaacaaggaattttgagagggcatcctaagaaattattcaatggaagagaaaaattatactcacaaagatgttcacagttgcactgtgtgtaatagaaaataatttctcgggggaacacaactctgttgttgcattttataattttatttaaaaaacaagcagtaaggaaagtagtaggtgaacaagaacagtaaaatatccaactctgaaaaatctgcatccatgtgaccaagtcaggccaaaagcctggaaatggaaaccggcaagatttgtcacacggtggagttatgagtgtggaattaattttcctttttcaaaattgtcatacaacattttttgccgatataataattttaaaaagatgtaacaagaggtttttatcagttaaaaattgttgctgttaaaatatgccaaccctttacaaaacattttaatacacaatgcactttttattttttaaaaatttccaatttacaaacatgttgcaaagatagttacagagaatttccatataccccacacatagttccctctgttattaatcttatagtcacatgatgcagttgtcacaagaattgatgtaatatttactaaccaacaatgagccaatattgattcaatgacccaatcgtgatacaatatgattctttattttgagacagagtctcgctctgtcatccgagctggagtgcagtggtatgatctcggctcactgcaacctctgcccagtgagttcaagcaatcctcctgcctcagcctcctgcgtagctgggattacaggtgtgtgccaccacgcctggctaattttttgt

SEQ ID NO: 70412 - DNA, 400 bp, Homo sapiens
aaggacctcacacgccaggaccgttctggagacaaggtgccgcccactgtacacggacgcaccaaggacctcacacgccaggaccattctggagacaaggggtgccctcccaaccgcagactgaggctcagcacaaagctgctgggtggcccaaggtccaggtcacagctggcctgagaccaggaggccaagcaggctggctcacaacccagatgactcaccaggcctgacccaacctcacaccaaacagcaattccaggagggctcaagactcctcgaggtggccgggcaccatggctcacccctatgatcccagcactttcggaggctgatgtgagtggatcatttgagctcaggagttcaagaccaacctaggcaacacagtgagacgccatctcta

SEQ ID NO: 70413 - DNA, 2777 bp, Homo sapiens
aactagattgcaattacctacagaaaggaataggagagaaaatgtggtcggccaaacctcagaccccctgcatctccagggcctccaggtacccactcaaccctggattcctggggagctgtcagcacagccaccccccagccggccccgtgagccctgcagaggtgacaccacagcctgcagagagcgaccctagtgcacccgggacgccgacacgcgtcattactgaggtggggcagaagcaacagttggttactcaccagatcagaaacgaacctgtcattttcccctcgacagcaaagtcctgagtcgccctaacgacaagcagcccctggaaacccactctctcccagggagccgtgaagctcttcatcgcaacactttctacaaggggagaactgaaccgaaggcttcacggccacagcagctccataccctcaacatgcaactgggacccggggaaagtaggccctcagcagggcagggcgacccacgacctcctctgcttcaccgcttcccccctgggccggttctgtccctggcccttccactgggacaagcatttccactgggagggatccgcgggggcacacacgtagcttctcaaggaataattcccttaagtacatcgaagagccctgcgggccacaggcggggaaggctgcccacaagacggccgcttccatcttcccaccgcccgcccagggagaagccggccacgcgccgggcctctcggtcaaggccacaggggccgcggccgctgagctgtgcgaagttgtgtgcagcacacagcactcgggacggcgctgggccggccaaacaaaaacatccgccgattccactaactacacaaccacctggcgacagaccctcaaaaacagacacgggcggccgcgctttctggggagacggggccgcaccccgcggggcagggggtcccgctgctacggattctcagaactcccgcgtccgctcacaagagccgcgtttcccgtgaactgcgcctcaatcgtgtcactcgttttaaaaggcccggggaagcctcgcgttcgtcgcgaggcgtctccctgcaaacgcccggggaggccgcggtgccggttcccaagcccggccgccgcaggccgcgcggctcctgggcgatctcggggcgcgtccctgctcacagggagttcccgtcttggcagagctcggcgggcctgtctgttacataaggggcggcccggccggctcggcggctgcccgaggcccgacccgactcgagcgcggactccgggcaggcgcccgcggcccaggccgccgagacccacagcccgactcggcctccctcgactccccggcctgacctacccggtctccccgcccggcctccccgtcttcccgcccgtctccccggccgcccggcccgacctccccggtctccccgcccggcctccccggcatcccgggctcccggcccgcagacaatgcggagccgccgccgccgccgccgccgccaaacatggcgtcggcaccacaaccccgagaggccgggccgaggcggcggcggcggccgggcggcccgcgaggcggcggggaggcctccccggccaggcccccgcccactcaccttcggggcgccgcggccgcgggagcccggcaagcgggcgggcgcgggggccggcgcggccgaggcggtgctaatggcgcccgcggctcctccgccaacggccgcgcaggccgggccccgccgccgctcctgggcgcgggcccctctcggccgcggcggctccgggcccggcagcggcggccgcggactctcgggcagcggctcgcgcggcgcgggctcgggctcggggcccagctggaggcccggctcggggggcccggccggcgggcgcgggcgcgggcgcgggagcgggcggcgggcggcgggcgcgggacgcggggctggctcggactccagggccgggtcgctcgctcgctccccagcgaagcaaacaatgcggcgagcgctccgcccggcgcgctgcgtgcgagacgcgccccgcccgccgccgccatgacgcgcggactccgctgcctcggccgcgcgcgggggagggggcgccgcgaggagcgggggccaaagggggccctgaggcggcggggaccgggctgggagtggggggtcgggaggatggagagtgggggcccttgagttagggaggaccgggccagaaggtccctgagggggtcaggaggatggagaatgaggggccctgaggcagggggacgtaggcctaggagtggggggccccgaggcaggtggggagcagccgggagtcgggggctttgaagcaggggggtaccggctgggagtgggggtccctgaggcagaagggcattggcccaggagtggggtcgctgaggcaggagatggcccaggagtgggcggctctgaggcaggggctaccaccggcctggagtggggggcccacaggcggggggacgggccgggagtgggggtacctgaggcagaaggacattggcccgggagtggggggccccgaggcaggatgggggagcagccgccagtcgggggccctgacgggggaacggccaggagtgggggtccctgaggcgggggggaccagctgagagtgggagtccctgaggcagaaggccattggcccaggaatggggggccctgaggcagggggcgattggcccacgagttggtgggggcctgaggcagggggcgattggcccacgagtggggggaggcctgaggcagggggcgattggcccatgagtggggg

SEQ ID NO: 70414 - DNA, 2491 bp, Homo sapiens
agtggcgcgatctcggctcactgcaacctctgcctcccgggttcaagcgattcttctgcctcagtctcccgagtatctgggattacaggagcccaccaccacgtctggctaattttttattttttttcagtagagacggggtttctccatgttggccaggctggtctcgaactcctgatctcaggtgatccacccgcctcggcctcccaaagtgcagggattacaggcgtgagccaccgtgcccggccgatatttgaatgtcatatacttttcatatatgctaaaatactgttttaattctcccccaacctcttaaaaacgagaaaagcattcttagctcaggcaccatagaaaacccggctgcaggctggacgtggactttggaacagtcggcgtgcgggtgaaggggcacagccgcggggcaggggcgggctccgggcagaggcggccgtgataactccacgctcccgctccagccggtgaccgccacgcgggctcctctcactctcacactcaggccgagaaaatgccgaaagccgtgtcaccaacgggggacctcggggccacattcagcatgcagagtttatttggtctgctcaaacatttgtgttaggaaataacacattaaaagtgcacatttccttcagaccctgagaagcgggcgagtcccgtgcgctccgcaccgccagccccggccccgcgctcgcccagagggccgccctcctcccgccgacccggcttggggcttaggcgttaatcccgtcccccgggggggccgcgcggggagccccgatcgccttagggtcaacggcttaggtcccagcccacgaggcctgaccgcaccgcactgagcggcctctgcgccaggtaagggggttcggggcgggaccgggaaccgcgctgctagccgtcccggaaacccgcggtgggccgttgggtgcgcgccgagccgctgccaactgccaagccacgggacgaaaccaaggcgcccgcgccccgcccagccagagcgcctaagcccttcccgtcgcccgccagcgccggagcgcccactgcgcctgcgtagtttgccctcctggacccgggggcggagccgaagcgcgcattgcgcctgcgtcttccgcccgaccccgccccagcggccgggcctccggcgctccgtcctcccgcccggccagggacgaggcggggcgggtacgcggacactgcgcctgcgagagtaggccccgcccccgatcggccccgcccccggccagccccgccccgcgccgcgcggggccctgggaggggcgcagcgtccggcggcgtcgcgggcggcgggcggcggggccgcgggaggggcgcgggggcagacaaagccgcggtaatgaatggagcgtccgcccgcgccgccgtcgtccgcagccggccgggagccgccccagaggccgggccgaggtgagtgcgcgggcgccgccgccccgccgcctgccgcgagccccgtcccccgcggaccgcgccggggccgggccgggccgcgccattgtctgcgccgcgccggggccagggccggggccaggcgggcgggggcgcggttccgtggcctcggggtccccgcccggcgccgccccggacccgcccccgcgcggaccccggccctgacagctggcgcgggggcggcgccgactgagcggccgagtgccgggggtcggcgcccggcctggcccacgtgcccgcgccgttgcttccgggcggacgggacggggctcgggctcggggcgccgcccgggtccgccgggagcgcgctgtcccggccacgtcgagttaaccccgcgagccccgtccctgggacttctctggacgtgtcattcccgtcccacctccaggaagggccacctgggccctgcttcatgtctcagcccagacgggtccttgcgacgcgccccgaggcaggttattgtacgtggttctggggatgaccgttcacatttaatgaataaaaatgtaacttgccttgcgaaccataatttcaaatgtttttcgactgcagtggttttcctacacccaaatgagctcgcagtcagttttgtttcttcttttgtcccgttgtgtggcccacaccgccttcgttgctaagagaatcgcagcccctcgggctcccttctgcgcctttctattccgggtggccctggtagacccgggcacctctgtggaaacacgtcccggccaagctgagccgtcagaagcttctgttggtgttctcgtgttggtcgaaagggaagttatttattttgaagttaactctgatcagattacgtttttagaaatccattcagacctcatagtgaggccagtttggtaaagcaagggcatcctgcgactttttacacagaaatgttttttattttttctgtgtatgtcattcatagtgacaaaattgaggctaggaaggatttggttgggatttttttttaagtgctatgaataagccacattttgattatgaattaat

SEQ ID NO: 70415 - DNA, 2033 bp, Homo sapiens
tcccaacttaggaggctgaggcagcagaatcacaggaacctggaaggcggagcttgcagtgagctgagatcgcgccactgcactccagcctgggcgacaaagtgagactccgtctcaaaaaaacagaaaagaaactggtcaaatcagatgttactttttttttttttaaatgtgcagtgttatctgcactccttccttccacaggcaggagttctctgaaatccagacgctgcacgttttatttcccctaatttaaaccaggggttcctgaacatgagcgagtgttcatcacctcaagcgcctgtagaaatgcagatccccagcccccagagaccctaagtggaccccagatccccagcccccaggtgaaaaacccatcccccaggtgggaggtccggccccaggtgaggagcccggccccaggtgagaggtccagccccaggtgagaggtcgggcccccggatgagaggtccggcccccgggtgagaggtctggcccccaggtgacaggtccagccccaggtgaggagcccggccccaagtgaggggtgcagccccaggtaaggagcacggggctgtgacgcgtggacatgcgcggtgaggcctcaggaatccagcgccagcgccagctcgggtcgcgccctcgcccgcctcctccctggtctcgccgcgcgcccgcctgaaggccccggtcgcggcagcgcgcactgacctccgcagctcccggcggcgtccttcgaagcgcggctgcctgggccagcctcggcaggaagcaggacggcggaaacagaacagagcccgaatctaaagtccttgcccaaatctaaagtggctaccgcagccccggccgctacggccgcagagaccctctgtgccctgagtaaagatggccgccgcgggctgcgcgcgaggggcggggagcgggaggcggggtcggacctgcacgccccgcccccggactcctggcggccgctgatccggggccttcccattggtcacctctcgtggcgaactcggattgggccatatcaggccggggcgggtcccatcaaccaatagcggcgcggggctggcgggtggggcggggcctcgccggcgccgtcaagtagcctgggggacaggccggcgcggctgggagcgggtgggcggccgggaggccggagcagcacggccgcaggacctggagctccggctgcgtcttcccgcagcgctacccgccatgcgcctgccgcgccgggccgcgctggggctcctgccgcttctgctgctgctgccgcccgcgccggaggccgccaagaagccgacgccctgccaccggtgccgggggctggtggacaagtttaaccaggtgggaaggggccgggcggggtcgtcaaccttgggcccggggtccccctcaccctgcatccggggtcgccccaccttgggcccagggtcgccctcaccctggatccggggtccccctcaccctggattcgggatccccctcaccgtcgatccagagtccctccaccgtggtcctggagtccccctcacccttgacccggatccacccccaccgtggaaccagggtcgacgccaccgtgggcctggagtcccctcaccctcgacctgggctcgcccccaccctggacccgggtcaggtggtaccaagcactatgggcactgtctcctcgcaggggatggtggacaccgcaaagaagaactttggcggcgggaacacggcttgggaggaaaagacgctgtccaagtacgagtccaggtgggtgccctggagcacccctgtgggtcttggcctggcgctgtcctgggaagtcgtgtcctgcctttggtgcctgtgttaatgacagggagacagaacagcccccgaggcaccagtcacccgtccgagtcacctcggcttctccctgaggactaatggctggcccctctctggccttccagcttctgctctggtccctaccccctcaacagacagtggcttttcaaaatgtaaactggaacaccagccccacttgtgggaaccgctcctgg

SEQ ID NO: 70416 - DNA, 1668 bp, Homo sapiens
tttttccagagcttcaggggcgggcaccagcagccccccgaggacactgttctcaaggttgtgccccctggactctcaccccaggctcacccaccccaagagtgcaggccccttcccgtcgcgtccaccgccagtggtgcccgctggacagagtgcctttgcctgtacacctccctggcgctgcctgtctgtggctggctccagagtggcaggcggtcttggcgcctcagccatgtcctcagctgacctgggggctgggtgaggtgaggcaccctgagacttcttcagcgtgctgagctgtgaggagggggctgggcctttggccaccacaggatgactcaaagggtgtggccttcagtggggtgctctcctcagcctgcccctgctgctccctcagccccccggtccggctctgtcccttttcagactcccagaccccgcaggcctggggtggggactctgcctgccacctgggaagggtggtcgtcagtggggtgactcagggtggagggccctggcccagtggccctgccctcctcctcatatgcccgtgaccagcacgcgggtgtggactgagcctgtgccaggtgggccctgggggtcggggggcagaagggcccaggtcctgcaggggagtggggggcggtgctggggcccagaaaggcttactgtaatgtggctggtgggggccaccggctctcaggccacacactccccctccaggcccagcgcccctccccgcctccctggggctgcggtcttcccaaaccccaagccggctgctctgcaccagtgaggggccgggagtggcctggcctgaggaggctgcagggcacccacctctccagagaccccctccacccactcccgggggatccttctggagagaccgttcccagccgttgagcagggtccgctctcccccctaccccggtctggcctttgggaggatccccccagagccagggaggggtatctggcccctcacccctcaaacggcagtccagggccagcgtctttctgcgctcacccacctgcctgcgacggggctctctgggccacagggcggccaccactcgagggtcacccgcaagcctcggagtccctgctcggagcgggggctggtggtcgcggtgggggtggggagcgggcacccactggggattcaccccacccgggcccccctccagcctctgcccggcgcccgggtcttcggtccgccctttgcagaggaaggaccccgccctgcgcagagcgggcttgggggacccgggcgggcggcggggcgcggggtggggcgcggggggcggtgttgctcccgcgggcgggaagggcggggagcggccctgccgggaagggggcggtgccggaagcgtcagctgggctttccccggcgggcgggggcggggagcagatgggggcgctacgaggaggtggggggaggggacgcaatggaggtgccgggggtgcgctgaagagcgagactggggcagggggatgagggtctgggaaggagcaggtgttggggacggagggtgggggcggggagtgggggcgcggggaggagcagggtgggggcggaggggaggatgggggtccgggaggagcaggggcggggacggaggggagggtgggggtccgggaggagcaggagtggaggcggagggg

SEQ ID NO: 70417 - DNA, 964 bp, Homo sapiens
caggggttggggcggaggggagggtgtggggggtccaggaggagcaggggtaggggcggaggggagcctgggggtctgggagaaggaggggtgcggggtgtggggcctggggtgagcaggggtgggggcggaggggagggtgggggtccgggaggagcagggacggaggggagggtgggggtccgggaggagcagggacggaggggagggtggaggtccgggaggagcaggggtggagggtgtggggcctgggctgagcatgggaggggacctgcagcccgtgcccagccccatagggacccgcccgcgctcctcccccgccgccccggccccgcgctcctcgtcgctgggaaccccctgcgggagcaatgacgatgagcaggacgatggctgtgagggcccggcccgagctctggggcgtgggccggagcgcggttggccttgaccttcttggaaagcccttggcggcaggtgactccgcttagtcacggccccgggggcgggggctccccgaaggaaaggagcccccgcgggagcaggcgcagaatgagatgcacgagcgccaccgccgccgccgcacaccccccgcccccccggggtggaagccagaacctgcgtccccagctcccccaggcccgcccacagggcgcctggctgggcctccgagctttcctgttttctctgcagcctggctgggcttagggagaggtggggggtgcgcctcttgatgctggggacgcgtgtggcacagggagccgggtgcagccaaggcttggaggggtgccccccgccccacccaggtcacacttcacccttcgtggggtcgggatctggtctttttacaagctaggcgccctcccccctttttttttttttttttttctcaaaaatgatcacagggaatgagcctcagccaggacagcgggctatgaggctgcctgttgcccccaccagcctgaattct

SEQ ID NO: 70418 - DNA, 1500 bp, Homo sapiens
ggacgggggcggggaggctggggggctgaggacagcttcccggcaggcctggctgcgtgggcccctcctcaggcccagggccggccaggtaaaaccagcctgaccgggtgctgcgtgtgagcctgcgtctgtctgcctacttgtcatgtgtgctgtggaccgcggccaggaggagctgcgtgcgtcacagcagtgccctgtggcaggaggttgggcgggggccacctgcgcgaggcccacctgcccagccagggcggggagcaggtaccagcagccaagatttcagggctgggccccaggggagggcagggccaaggcccaggcagagcccctccacctgtcttcacaggccaggatgcagagacgggtatctgggcatcgagtggagaccgagagaggcagggaggtcaccaggccccatcaggaggccaaatttggcctggggcctggccctgagtgggctaagactcaactccatacctcccacccctggctgtgcccacccacctcagcccaagggtagctgaccagtgccctccagagccctgaaaccctggggcagggccagttggaagggccaccaactcccgcacacctgtggctggtttctgcccagatctcactggagggatccacgcccaggcaggctgctgagtcgcctctgctgggagctcaggacccaggtgggatttcaggaccgcaggccctccactgaggcccgtgtgcccccactcagcccagcccacctccctcccacccacatccttccaagactcagctcctcccagtgccctaggcctggccagtggtaatgctgaggtgtgaccacaaggcccatttcacagctaggaaggtgggctcagggtggaggccccaccgggccacagactccatcgaggtgcctctgatcttggggctaagtcagtgaccaggaaagagaggccgcccgactgaggtgtaaggagtgcctgggccccagcaactgtagccctcactcctgccaccggcagcccggcctcagcagagctgacacagaagagtgggttgcaggctgagctggtcctccggggcccaaaccaggcctggcacccacgaccctgaagagtgggaccccaaccaccccgacacctagtcggggcagggcagcagggacgggagggagctctgggccaccgaaggggccagggcgctggatggggaatttcctggaggtggaggagcccagcaagggtaaaagtgcagaattctttccattctttgcatttctctgagatgattctgcagagtgtgttgcctggaagacccgtggtgtctgtgtgtgtgtgtgtgtgtgcacgcgtgtggtgcgtgtgcatgtgtgaacatgtgtgtggtgtgtgtgcacgtgtgtggtgtgtacttgtgtgtggttgtgtgtgtgtgtgcacgcagcctgcccctggtgcctcatcccccccttccccctgggagcggccccgctgtgctggcagttcggccccc

SEQ ID NO: 70419 - DNA, 928 bp, Homo sapiens
cccaccgcaggccctggatgttgacacagacacacccacaggtgccccttcctgggttcgagagccccgtcctctgctcctgctgcatcctggggtcaaaatgcccccggggcctcttggtagccacccaggctggccctggggacactcctaggaacagacccaggtccttccggaaaaggccgcaggaggagagtgtggaaggtccccgcagagccacacaggcacagcctggaggacatcacttcctggggctcatccagctgactcgtccccagccctggtccagtgtcatgtccaggcggtggctgccaggatccagcccctaaacacagcctgggggccacttccagccgcctggaaaggaagagacaggcttggactggtgccgtccttgctctttctccgtgagcagaactttgggccacataggtcctttctcggaaccaatgactgcccccaccaaacccaggtgtgggggactctctcccctcccccaggcccatttctgggccatctgaagaggacatcccaagggcctggagtgcccacttgccagctccaagctgtgtggattctgctcgggtctggcaaggaggggccagacagagcccggcctgacgctgtcacctgtcctgccctgagctgtctgtgggcagagctcaagctctggcagcaacactccagtctgagtgcccagctgggccagctgccattcacaggcctgaccttcccccaagtccccatggctgggaaggcggctgccccctctgacaggagtggggatccaggagccccggaggtgcgtgcatctctggggtggtgacggcgttctgagcccatgctctgcaggaatgtttgctgtgatcaggccccctggggggtctgagcccctgggactccatctgcaggtccggctcctcatggc

SEQ ID NO: 70420 - DNA, 1600 bp, Homo sapiens
ccccggcctggctctgggtgggagagagcaccccactctcacctctgcacattctgtgatcccccaacgccctcctgacctcctccggggagcccctgggtgagacccacgggggagctgggctcggcgcgtgtgtgagcctgcagcagccacacagacaccctggaggagggccagatctggcttctggctcctggggaacccccaccaccacctctcctgagtctcctcctcatcagaatgctggggaccagagccaaatggctggggcctatcctgtctgggcaccaggcagaggccacccaactccctgagtcctccaaggtctccagcctgggcccagaagctaagccctcgcagtggggtcagatgtgagctgttgagggcaactctgcctccccagccccgcgtggaccaggccaggacaggaagaatgaggtggggcccccatgaccagctgcggctcttggcctgcaggatttcagcagggagaaggcagaactgccatgtggcacgctgagcactgcccagccgcctcatcccaggagccctcctcccggggtctgtgcccaaaaccacaggctcttctaccgggcgcccactgggtgctgtgggacgtgctgcttggtacaatgtcgtcagattctccgcacagcctccacagaaatcgcagtgcctctccagagactgagcctgatagagtctggggatgtgtctgtgactctgggctgggtcagcggaagagcagggacccaggccgaggtgccaggacggccccaaagggccaccagggaaggcactgcagggccaaaggccaagagctatgaagtgggcagggctgtggtccaggcccaaggccagggtggcctgtccctggtcaacaggtcagaggtcccaggtgagggggccctgcacgcctgccctggcccccggcccaggcctgggacacacaggccacgcagctccggctcaggctgagtcgtggtctgggtggtggcaaggccacagctctccaggttggcagatccagtgaggctgctgcgctgaagccacagttcccaccatcactgcagcccccgggcgaccaacagaggcagcccccctccagctgggtctcagcgtctgctccactgaggacagggttcaggacgggacactcccacagcatcttctatgtttgtgcaggactctttctgcagagtccaagtgacggatgccaggcggccatgctcactggggcccaggccccgggtggcttatggaatataaatggtctgtgctggtagcaggtgggggtaacctggtgggaacagctgcctctctaacacaggccaggcctcagctgaggggtaaaactggtgtcctccaggcagggacagaggctggaagaggcagccaaagcggctgggcctgagttcatgcaggtcgcccacacccccagctcccactgactaggcgccccactccaccccaggcccaaccctgggatgcctttggtgaaacgttgcaaaatcctggcacagctctgctggctcctatctgcagcgggtgagaggctgcgacgaccgagagtggaggccagaggggaaagggcctctcc

SEQ ID NO: 70421 - DNA, 5111 bp, Homo sapiens
cgggaggacccacatgggcagcagcccctcctccttcgcaggtgctgtgtggatactgctggaggggaaggcttggggtgtcatcctaccagggatctgatctcgggggagccctgtgctgggtgcgtggtgggtgggggaaggctaacccaccagccccaaccctgccctcgtactgcgggagagaactggacagagctctgggaagcagcggctggagggggaggggcctggggacaaacaatgtcgcgttggctttgatcctcaggacccaagggacaggaagagatgagctaggcaagagaggagcccccaggagcacaggcatgggcccaggcagcgggcgacgaagcgagccccagagggcgcccagatggcaggtgggcctgggccagtcccgagagccacagcctcagaagagctgaacaggggagtggtgtgtgagtggtcagcgcagggacagcgatggtgactgtatagagatgagaggtcagacttaggggaggctggaagctccgaggcaagtgtgtgtgcgcgctgacggtcacaccagaccgcccggggatgtctgccacaatatttagacccctgagggccactgagaacgcctggcagtgccaagaggaccagcccctgggccctctggcccccaactctcaacccactagccctggggctggcgggtggccactcacgtcctggaaccctgagctgctctcaggccggtgactttggaccaatgttggcaatctgtgggtttgcaccaaaccacacaggtgagtcagacttctgtacagagagcagggaaggggcacgacagggtgaagtccagaccagggcaatgtgtaccccggctgttcagcctttgagtgcggctgtcgcagcaatcaaggtgggctccctggtggaggtggacagcagctgctggagagcccggagggcagccaggaccgtgtcagacggcaggagtcgggcggggccactccaggcaccggccagcagggcagaggtaccagggagggccctcgggctgcgggcgtgaggtcagagcccagggtgaggaggaagcatctccagccaggtgcgctctcggcccccgccggggctgcgaggctgggggcgctgccgctgcgagggcttccagaggagccggcgctacctccccgcgcgcccggccacgtgcgcgacgggatgcgcagacagccggggacgcagactggcggcgtgtgtcacctcgaggccgcgggacaagcgcaggtcgcctcccgcactcccacacccccaggaaccctgctcggggccggcgggtgaccttcctaggcactgctgggggcggagccaggaaacggctcgccccgccattggctggggcgccggatttctttaaaaactccggcttccattggctcgtgcagtccctcctcgttctgcccgaggcgccacggccgccacccgcgcgggcactgcgcctgcgcggagtgagagcgtgagcgcggagagcggaccgacgcgacacgccgtgcgcctccgcggctgcgctacgaaaacgagtcccggagcggccccgcgcccgccgcacccggccctcgcccgcccgaagacaggcgccaagctgccccgccgtctccccagctagcgcccggccgccgccgcctcgcgggccccgggcggaagggggcggggtcccgattcgccccgcccccgcggagggatacgcggcgccgcggcccaaaacccccgggcgaggcggccggggcgggtgaggcgctccgcctgctgcgcgtctacgcggtccccgcgggccttccgggcccactgcgccgcgcggaccgcctcgggctcggacggccggtgtccccggcgcgccgctcgcccggatcggccgcggcttcggcgcctggggctcggggctccggggaggccgtcgcccgcgatgctgctctccaagttcggctccctggcgcacctctgcgggcccggcggcgtggaccacctcccggtgaagatcctgcagccaggtacgcgcggggccggcggggccggggccggggccagggcggggaccgggggcgccccgggccgcaccaaccccgcccgcgcctccctgcagccaaggcggacaaggagagcttcgagaaggcgtaccaggtgggcgccgtgctgggtagcggcggcttcggcacggtctacgcgggtagccgcatcgccgacgggctcccggtgagtcggaccgccgggcgggcccgggtttctcgcgcgccttgcgcctcgcttggcccggcctgacccccgcgtctccgcaggtggctgtgaagcacgtggtgaaggagcgggtgaccgagtggggcagcctggtaagttggggcacgggcggcggcggcggcggggggcgggcgcggggcttttgctgaccgccgtgtcccccagggcggcgcgaccgtgcccctggaggtggtgctgctgcgcaaggtgggcgcggcgggcggcgcgcgcggcgtcatccgcctgctggactggttcgagcggcccgacggcttcctgctggtgctggagcggcccgagccggcgcaggacctcttcgactttatcacggagcgcggcgccctggacgagccgctggcgcgccgcttcttcgcgcaggtgctggccgccgtgcgccactgccacagctgcggggtcgtgcaccgcgacattaaggacgaaaatctgcttgtggacctgcgctccggagagctcaagctcatcgacttcggttcgggtgcgctgctcaaggacacggtctacaccgacttcgacggtgagcgcgggcgcggggcagggaacgttccgggggccttgccggcgggttaacgcctgcaggggcggcacatggaggggctgatgactgttgggcggccgcgcgccctgggtctgctctcgtggggagcagaggcccacgcgctaccctggggagggctgagcgagggatcaagagcgggatcgtgctgggtgggggctaggggcgcgctcaatattgcttcctccatcgcgttggggggtacggggcctcttgccccggtgtgggaggcgcgtgacatccttccggcccgagagacccccggctgggggcggtagcggaggagtctccgtgcgtgacgcagggcgcagccgggctgggtctgcgccgggagcctggaggcccccgcggcgcggttggagtggcggggcctcccctgcgtgggggcgggagctgcgtgcgtgcggagcgcgggggcgcggcggcagaaatccccgcattgcggagcttggggaagccggggctccccgcccgcccctccctcctccctccctctctcccctccccccgttcccgcaggcaggcgcgccgggcggtaagggacccgcgctgtcccccccccacccaggtagcctcacagcgcatctgtttgttgtgaaagccgagctcttactcatgtgacctgctcctcccccgcggccggcggagggggacggccggcccctcccccagcccccccatcgcctgccggggtttttccagggtgatgacgagcaggattttgaggcctggctctgcttcctgttactgaggccagggagttaaccagcagggacctcgccgtctgttgagcggctctgcctctgtggtgggcgtgctaagccctgtgtccccttaggcacccgagtgtacagccccccggagtggatccgctaccaccgctaccacgggcgctcggccaccgtgtggtcgctgggcgtgcttctctacgatatggtgtgtggggacatccccttcgagcaggacgaggagatcctccgaggccgcctgctcttccggaggagggtctctccaggtgcgtggtggctcgaggcgggggtgggggcctcgccctgcttgggccctccctgacctctccgctccgcacagagtgccagcagctgatccggtggtgcctgtccctgcggccctcagagcggccgtcgctggatcagattgcggcccatccctggatgctgggggctgacgggggcgtcccggagagctgtgacctgcggctgtgcaccctcgaccctgatgacgtggccagcaccacgtccagcagcgagagcttgtgaggagctgcacctgactgggagctaggggaccacctgccttggccagacctgggacgcccccagaccctgactttctcctgcgtgggccgtctcctcctgcggaagcagtgacctctgacccctggtgaccttcgctttgagtgccttttgaacgctggtcccgcgggacttggttttctcaagctctgtctgtccaaagacgctccggtcgaggtcccgcctgccctgggtggatacttgaaccccagacgcccctctgtgctgctgtgtccggaggcggccttcccatctgcctgcccacccggagctctttccgccggcgcagggtcccaagcccacctcccgccctcagtcctgcggtgtgcgtctgggcacgtcctgcacacacaatgcaagtcctggcctccgcgcccgcccgcccacgcgagccgtacccgccgccaactctgttatttatggtgtgaccccctggaggtgccctcggcccaccggggctatttattgtttaatttatttgttgaggttatttcctctgagcagtctgcctctcccaagccccaggggacagtggggaggcaggggagggggtggctgtggtccagggaccccaggccctgattcctgtgcctggcgtctgtcccggccccgcctgtcagaagatgaacatgtatagtggctaacttaaggggagtgggtgaccctgacacttccaggcactgtgcccagggtttgggttttaaattattgactttgtacagtctgcttgtgggctctgaaagctggggtggggccagagcctgagcgtttaatttattcagtacctgtgtttgtgtgaatgcggtgtgtgcaggcatcgcagatgggggttctttcagttcaaaagtgagatgtctggagatcatatttttttatacaggtatttcaattaaaatgtttttgtacatagtggataatcctgtatttatggggctgggcatcctgggggaagagaggggctc

SEQ ID NO: 70422 - DNA, 5282 bp, Homo sapiens
  modified_base (4842)..(5282): a, c, t, g, unknown or other
ggcctctccctgggggtcgaagcccagcagaatccactgtgttcctgcagggcctctgtgggctcctaggtgggtccttccctatggactgggcccctcccaccctgcctaggagcctccagggctgcagtaccccttggccactcgggttgagggatgatgtgtatccccagccatgctcacccctgcagggtgtacaccaggtgactggtctggacctgctgcctgcaggatctggggccagagtccaggtcagaaccagcccaccgccctgagcctctctcaggggaagatggggtacccaagcacatccaccccagggcaccctcctcctagcttgcagacctgggcctgcttggccgcttatgacttcgggtgggcgcctggcctctgaggctgtttcccccacctgggtcattcagagctgggtccaggtgacccatccccaagggaggccccttgcttgttcatgggggagcaaaccctcaccccacccatcctggtcgacatctggggcacggcaccctgggagaggctttcctgcagggccctggccaggaggagggcagtggccaggctggaggggcaggccctgcccccaccctgccttgtcaggccttactgccgggaacccgggggccagaggctgttcagttgtgaaacgaaagctcagggtttcgccagggctgcccgggaagcggtgggcctggaagccatgtgccagaggatctagcaccgccatgagaggcctctgtctgcagaaaggggaaggactcattgagaaattccgggctgggaatctatcttgggccctgtactctctcagccccggcaggggtcaggggcaggggtcagggatggacagagacccagcaagctcttatctcccctgtgctctgtgggcagactggctgacacccttccctaacgcctgcctggggccctaggcccagccgcacctggacgctgcccacgcagatcccccagcggcccccgtccagccttggtgtcctgactgcttcctttggaggagcctgggtgcctcagacccggtgtgggcttagctcccccttctgtctcccttgctctccccgactccccggggcccggtgtgatgctggtgtcatatcacaccgcgagctcagcctgagggtccaatgggtgtgtgggtgtgtggtcagccctcagccgctgcctgtccaggctgccaccgcccatccagggagctgctcggcctctgcccacagaacagccccgcagctgcacaggtggcttcctacagtttcctttcgtgctgtttccgcgacagctcaggggctcccgggccagttgggtgcccggcacggggtggtgttcgcaggggctgccagggatcacttccctttgccgcgcagctttggcaccacagccatgctaaggtttcgtttctggagctgctttggaagaaagaaactgaacagcgccctgatggctacagaaggtctgtgtcccagtctctccttctgggaagctgggctggccttgggcccagaggcggtcgagcagcctggcaagaagaacggacctcggagcggaaccttgccccctgtgtgggtgccgggcaggctgtggggcacgaccagccttggcccctcccccgacctgtttactgaccaggccaccctcaggggcatagctgtggacaaaccaatcagttccaaggctgccgagtgagccaggacggcatctgtgtggcccagcctgcactgacagctggaacgacgcactcaccacagtacgcagcggtcacatgacactgaggaccacagcctgttcaggactccccctggggtggacgctgtccagaacttggcagaatgtttctaaaggacacctttagatagcaaatcagcaaaggaccacccgtgcagagaataattggaccaggtgtgggaagagaggtcagcgtgtggacgtgggcggggtggggggtacggagcctgggcacagtcttctggaagttgggggcaaggagcagagggtggaggacgagacccaggaagcttccggcctggaggaaggcaggttggagtttcaagggtctggtctcccagacagtccttcctaaggcagcctgtctccctctcctccagccccatcctggacctgagacaacctgggtctgagggagcccctcccagacccgagactccgcacacagggctggttctgatgagcagatagatcctgctcctgcagagcggggtgtcctgcagatgccagggacctgcaaagcctggcacagggcagcacagacctccccgcctcgcccgccctccacagagcctccaggccctgagcagtgggacagccgggggcagctggaggcacctgcaggcaccaggtccagacccatcctcctggccaggtccctgcagaatctcccaggggtgccgtgccccagatgccagccagcatgggtggagtgggtgttcgctcccccatgaacaagcaaggggtctctcttggggatgggtcacctggacccagctctgaatgatccaggtgggggaaactgaagcccagaggccaggcgcccacccaaagtcataaggggccaagcaggctcaggtctgtaagccaagaggaggctagcctggggtgggtgtgcttctgggagccccatcttcccctggaaggccagggcgtggctggctgtgagctctcccctaatcctgccacctgccctcctgcagggccctgggctgcactctgctgctccactgacacaggtgggggccagctgaggagccgatggccctccaggcccagcacatgatgcagccccatgccactctcctggcctgaagccctgtggccactgtgctgaggctggctctgtgggcttcctccggactctggggcttggcctgtgcagggcaggtgctcggatgtcccggaggagctcctgggcagcgtccgttgggcccctcaccagaactgctgtgatcagtgacccccaccccactggccactccagcaggtggcggggggcatggagaagggaagcactggtgccccagtcctcaggccagacccagcccaaaggtggtctgagcattccctgaggccgctgagtgtcctgccagggtccgggctgtgcgaccgccctggactgcacctgggaagacgttcccatcaggcggctgggcctgctctggtttgcaggtgccctgggtcctggggcccagtgactggctccaccccttgggccaggccaggcagagctgtttgcctgcaaccagggaccaggggtcctgggccactggacgctgccaaggctacagtgtgccaggaaagcatgaggaccttttctgggcctctatgtctagaaaggacatgagatatgggccctcatatcccatgggggagcgggtcagtgtagagaggaccagggacctggaaatgccaggattgagtctcaggccacatgtacaacctgctggccaggtccccacagaggcagccctatcccacggagcatcccagaggggccaccccaagactcccaaccctccacttgcccctgtctggttttctgcttaccaaatcctcccacttttcactcaggagggaaccagacgttcctgagcctgggggctcacccctgcctgagaggcatgaccaagacctatgtgggcgggatcattccagatgtagcagaaacatggtgagggctctttggggccactatcaccatcagcctttgcacaggtgggctccccagtggggcctgggagacagcacaggcagctctgcagagatctggggagaggggcttggcagtggggcagcaggtgcaaaggccctgaggcaggcggaggggccaggaccacagtcccatccagcactcgccctgggccctgcctcctggtctactccatgcccagggtccccctcaacagtctgttccgtgtgggatgagctgaggggaggaagcaggggtctcagaagcacaagggccctgagcagagccctggggactgtctcctgctgtgagacaggactgggcaggggctggcaggcatgtgtctgggtggcccatgccagccgtggagcaggccaggggctgctctgatgcccacaggactgcccatttgccagcacaggacctggccctggagggtcctggagtcccagctctaccctgaagcagccacctcagtcctccctctagaaaggaccagcagggtctaccgggccacccaggaatgcaggcaactcttatgatgtgtaggcacctgtgtgtccacatctgtacacgtagaaaagtgtcggtgggtgtgtaaatctatacatgttccaagtgtgtgtgtctgggtttttgtgcatgtgcatgtgtgtgtgtgcatgtgaatctctgtgtgtgcaggtgtgatttcctgtgtgcacgtctatgtgtatatgcatgtgggcacgtgtctgccatgtatgtgtgtgctccaatgtgtgtgatcctgtgtgtgcacacgtgtgtgtgcatgcacgcgtctgcacctgggcaggacctggcctaggaagagcctggagccaagactagcagttctcccctcccccgcccccaaatgacgtggccgctgccaccgcgtgactcaccctcccttcactcaaagggcacagcagcacgtgggggcgcctcctgtgactcagcacctcccggaggcggtgaagggggacgctggtgacaggggaggagtctggagctgagaggcgaacggagagcacagtggagcacacgggccctgcccacccgcctgtcctgtccaaggatgctggggccccgaccagccggtcacaggcgcnnnnnnnnnnnnnnnnnnnnnnnnnnnnnnnnnnnnnnnnnnnnnnnnnnnnnnnnnnnnnnnnnnnnnnnnnnnnnnnnnnnnnnnnnnnnnnnnnnnnnnnnnnnnnnnnnnnnnnnnnnnnnnnnnnnnnnnnnnnnnnnnnnnnnnnnnnnnnnnnnnnnnnnnnnnnnnnnnnnnnnnnnnnnnnnnnnnnnnnnnnnnnnnnnnnnnnnnnnnnnnnnnnnnnnnnnnnnnnnnnnnnnnnnnnnnnnnnnnnnnnnnnnnnnnnnnnnnnnnnnnnnnnnnnnnnnnnnnnnnnnnnnnnnnnnnnnnnnnnnnnnnnnnnnnnnnnnnnnnnnnnnnnnnnnnnnnnnnnnnnnnnnnnnnnnnnnnnnnnnnnnnnnnnnnnnnnnnnnnnnnnnnnnnnnnnnnnnnnnnnnnnnnnnnnnnnnnnnnnnn

SEQ ID NO: 70423 - DNA, 631 bp, Homo sapiens
tggagacaggtcaccctggacagtgtccagcgtcacggtggtcgtgagggtgaccacaggaggtggtccgtcagctccacatggagcaaaggcacagccagccacgcctatcacagcgtgtcacggatggtttcatcggcgcgtttaactctctcacatacatgatgtcctttcatcatgagattagtagaacgtgattgatgagacactttacattttttttggttcaagtcttcaaaatccaccatgtattttacacttagagcatgtcaggtttcagactagccactgtgcggtgcccgagagccgtgtgtggctaccggattggacagcacggatctgaacaagacagggattttttttgttaatgtgtgttgatgagtcaaaggtcaagagccgaagagccagtcctcactggggtgcagagggctctttgggggcagagcgggcactgcatggaccctgcaccctggagctgatgttcaggtagtgggaggaggtggccggccagggcaggccgctctctcagaggcactctgtgcagaagcagggagggtgctgcaggccgctctctcagaggcgctctgtgcagaagcagggagggtgctgcaggccgctctctcagaggcgc

SEQ ID NO: 70424 - DNA, 1465 bp, Homo sapiens
tatttggggtgactgggtttatctggggtgactgggtggttgggtgctgggattggatgtagctgaactgcctgcctcaggatgaagtttgctggaagtcaggggctggcatccctcagaaaacatgcaaggatctttaaaaacgcagacggcgtgaaagctcaaagcagacacatcccctacgcagcccagggaggcagggggacctcctggtttgctcacagcagtggccgggcctgtgaacacgggctcaaaatacatttttggaatgaattattgaatgaacttaaaactccaatcacactaaatcttttatatgaaagatcgtgcacgttcgtcctggtatagtgggaaggggacctgcacgagggaaaacggctgcctcgaagaggcagggaccacgcgggatgcgcccgcgtctgaagccagacccccggctccccgagggagaacaggacggagggcggggctgtggggagcggagggaatgaaggtcagggaggcggcggggaccccctgagctggcacaggccccgggaacgtctgtggaacaggggacgggatggggcgtgggggaaggaggtgcgggctgcaggagcgggggtgatggggtcactcacggcggcgggactgggggtactgggtgggggggtcgggtggggccggggctgcagtggagggtgtggggcggggagatgccctcattgcccgcgcactggcgcccgagcccagagaagagagcgccggcttccccgccagtggccgcagcaccccaggagcgcgggaacctccggacccacagcggggcgcggccggggcaggtggggggcccaggcgaggaagccccctctgcgccctgggctgggcgaagggccctgcgatgcgacgggggcagccccagcgcgcgcccagtcctcacgtcgccaccgagcggcgcccccgccccagcccggagccccgcagggccgcccccacccctgcccaccctcccgcgggccggggcagccccccgccagccaccccgcgttcccaggaagagggaccggtcattactcattcatgtcctttcatttcatttcaatattttctgcaaagtcatcgcccgcgccgcatctgcgtggcggggggcggggtggggcggagccacgccgcggagtcgccgcaggtaaacagccccctccccgcggcgggagcggggccgccggccccaggcagggacagcagccgccgcccgcgctccgggccgggatcccgccgccgcccccgccggaggcacgcgccagggcgggggccgggctgcggcggaggcgggcggctccggtgccccccgccgccgccccggcccggcccgcccgccccctgaccccgggggcggcggcggagcgccccccaaaccccgctgcgggctccgcgcccggccagccccgcacccgccgcgcgcctccggctactcccatcccccgga

SEQ ID NO: 70425 - DNA, 1949 bp, Homo sapiens
cgccgggtcccggccgccccggtagaggctgggtacagcgagggggccgggcgcccgggcaggacgggcgcggcgggtggggcctggccgtctccccctgccctcggggccgaacacgcacagcgagagtctagcgtcggcgtggctgcggccagccgggtccccctggaggcctccggacgatcggaagtgactgagcgtccgggtccgtgaggccgggggtcggcccgccctaagactcccacctggtcccggttctccgtccgctaggctggccgcggggcccctggggcccgaccttcccggggtgccccaacctgcggcaaggccgaggtcccgctgaggcatgagtcccgggtcggggaccgctctgggccgacccccggaggacggactaggccgatccccagagggaagggggccaggccgaggccatggcagcgcgttccctgatcccgtgttctcggctcctcgcgtcccactatcggctgtccctttcgtgcgggactgacggctcacagaacagttacatttcaatatcattcgactgaaaaccatcctgtggacgccgtgcgagcattgtccccatttcacagcttgggagctgcgaccagagaacgtgggcgcgcctcgcaaggccgtgaccgcggcgggactcgaaccctccctcctgagtgcgcgccgatgttccttaggacccgggagcgccgggggggggggggggggcgggggccccgcgcgctaccccctgggaagtgtagtccgaagttgcgggccggggccaagcaggaggcgcgtgggactacacttcccggcatgccacgcggccgccggcgccctcggcccgtccgccccgccccgccccgcggccccagcccgccccgtccgttgagggcccgcgccgcatggaggccggctgaggagcgccgctgcctcgcctcggtacgccgcgcggcgcggacggcgcgtgcgtgaggacggggcccagcaccgagcggggggcgggcccgggtcagggccgcggggtgactgtggggggcggggggagcgagcccgagtcggggggtgggggccgggggcggggggggtcaggcccgggtcaggttttggggccggggtagcaggtcgtgggggtcaggcccggatcaggttcaggttttggggccgggggagcaggtcgtgggggtcaggccagggtcagattcagggtttggggctggtagaccagggtcgttgggggccgggcccgggtcaggtttgggggccggggtggcaggtcgttgggggggccaggcccgggtcaggttttggagccgggggagcaggtcgtgggggtcaggcccgggtcaggtttggggcgggagcaggccccgcgcgtcccctgccaccgctgccgggagcggcgctgccgaggagcggagccccccagggctggggcggggagggtcagcggcggcctcgcgggaaggcgcgggtcggacctcgagtcccagggtcctcgcgggtcgggagggccccagccacccccgcctgccgcctgcggtggagccggccgaggtgagagtggaggaaggcggcccaggcctgcgggtctctgggggtgctgggggaggccgagcgggaggccccggacccccgttgtcccctccggccccgctgaaacctggggcttcgctcttctgtaggtgcctttgcccttcaattggagcagagcggggttcccatatgggcgaagtggacgccagatcgtcccccgctgtgcgcagcccaaacttaaaaggtctttttaactgagctatcatgaagctgccgtgtgtctttgtcaaaactcttacaagaaagatggagtgggagctgtctgggcactagcgtcccagaaacaaccaggaacttgtggaggtgctaagctccctgcggggactcccgcagcctcggtagcctccagatgg

SEQ ID NO: 70426 - DNA, 1611 bp, Homo sapiens
ggccttggcgaggagggaaagagagtgttgagactgtaagagtgactgtcagagacgtcccccagaatcacgggctttaggtgctggggggtcctcagtgaccttcccgcctggctccctgcgggcagcacgcctctgctgagaggctgcaggggccagggctgggggctggcactgcctctggtggcgctgacatcgtcctgctcaaggcttggcagccggcccaggaaagcttctctgccctccctgacaggagacctgtgcacgcccaccccatggcacgactggggtcaggaccagcgcctgctgctgcaccgagaccctgccctgtccatggccacaggcgtaccctaggccggcctcagaggcgggtctggccaggctgggtggagggtgggggctgaccgcagacctggggctgccacacccatgggggaagggctgtggcgacgtgggcgcctcctgttggctgggccgacgcagcctcccgcccggctgcacaggagtttctttaaggagtttccccggtgtgcctcggcagccttgcgctgctctaatggtccggacttccgtgtgtgagtttcccccgtgcgccccggcagtcttgcgctgctcctaagagttctggcttgtgtgtgtagctagacccagggaggcggccgtctcccggaccgggtgcttgtctgggctggctggcctggcggctgctcacaacagcttccggtgggttccggtcgggttgcatcgtggagctttcacctacaaaaggggaaggaggcggcccaagggtccggggcctggtcctgctgtgaccggtgccagctgcacttcctggatgtgccaaccgctaagacgcccaggccagggttgggtccagactcaagcccaggtggcaaggagtgggaccccctgccaaggctgtgaggccccataggggagcctgcctgtggagcgggccccccttgccctctgcagaggctcaaggcccccggggacatgagcctggtgtttatcagctgtctccttagtctcagctgacctcccccgaccatggccccattgcaccacccaccccaagccaggccagttcctctcccagaagtcccggctgtccaagaagagggcagggtgggctgccctcttctcggccagcttcagatggggcctctggttgcactgagacaggcctcttcccctgctcagagccgtccctgctcccccagcccctgagctgccctcctagacactgcacagagagctccttcctgttcacaggttaggacacccaagcttggaggcatcttaacttggatgtgggtggccaggacccagctgggtctgtgagtcctggctggggccgaggtctgtgcctgctgtggctgtgtgccaacagggtttgcagaggaaaggaacctgacatagcgtcttattgctcattgttcctttttcttatgagttctgagaagtgggcagcagtagtgacatgaaaatgaccccagatgcacgcaggcatcagtgcagaacccggcagtggcccctctgaagcacatcctacaagccccgtcgtttcctcgccagatgctcgtgtctgactgacgcagacgcttcaag

SEQ ID NO: 70427 - DNA, 583 bp, Homo sapiens
tgggatggggcccctggtgctggcgtcagctgtgctgaggggcagggagcggctgtgttctcgaggtgtgacctgtggctgttgcagaccatccgggaggtgcagcctgacgtggtggtcgtggagctctgccaatatcgtgtgtccatgctgaagatggacgagagcacgctgctgcgggaggcccaggagctcagcctggagaagctgcagcaggccgtgaggcaggtgcgcagccgcgggcaagggtcagggtcagggtcggggtcaaagccacctgtttgcctgttgcccaggttcctctcacagcccatgcccccagtcagtgtggctgtgcctggcctgccctggggattgccgggttagggacctcccctgggccaggagaaatgaaagaggctccattacccggtttcaggcaagggaggaggaaatgggtggctctccaagctgaggcaggggctggtcacccgaggactgggttgctgagcagttgctggggatgggtcaggtctcagtgcaaggttggcccccccggtaccacacccaggcccaaagtgggtggggctcagggctcctcctg

SEQ ID NO: 70428 - DNA, 2716 bp, Homo sapiens
cacgcagagtctcggaagcccacgctgtggccccaggagaagcttctggatgtagctcctgtatgtgaagggtgggctcgcgccgctgccggaataaagggaaaccacaggcaggagggaggcgcgtccaggatccgcggccaccggcctctcagacagtcctctggggccggggccggaggagatggaaagcgggggcaccacagactcatctgaacccccgcgttcattcggacacacagaccccaaattcctcccccaggggtcgggtccctcaagccagccgaagaccccggtgcccgcccagccctccgggagggtctgcgcctgcggcctcgcggggcctctccgagcccgggcgctgttccatgggcggggcacagatccaaggccccttccctcctagacggcaggcgaggggcccgagaggccggaggccaggggacaaggtccccgagaggcggcgcgaggctccggcggcccagaaccgcggcggggtccgggtggggtcccggccgcccgtggggcgcggggctaagccccggcccgacccgaacggacgcgggcctcggtccccgctgccggcgccggtgcagccgaggaaatccggggctgcccgagcggggtcgtcgctggcggtctcggaggcgttcccatctgtcaccccgttcgcatcagcgcgcgccccgtgacgccgacagccaccccggacgcctccgaccctccggccgggagatgcggatagacggacgaggcagccaattagagcccggccagacaccgcgacccctccccccacccgccccactctcgcccactggcgattgggttgcgggacgcgcggggcggggcttccgggcggggcaggctggcttccggcgggagcggggccgcggatggccgtatacagggcagcgctcggggcttcgctcgcggctgcccgactcttgcccctcggtcgctgttccccgtcgccggcgccccgctctacgttgtcgggcgccgccatggagcccgcgcctcgctggctggcggggctgcgcttcgacaaccgcgccctgcgcgccctgcccgtggaggcgccgccgcccggtcccgagggcgccccgtccgcgccgcggcccgtgcccggggcctgcttcacccgcgtgcagcccaccccgctgcggcagccgcgcctcgtggcgctgtcagagcccgcgctggcgttgctgggcctgggcgcgccgcccgcgcgcgaggccgaggccgaggccgcgctgttcttcagcggcaacgcgctcctgccgggcgccgagcccgccgcgcactgctactgcggccaccaattcggccagttcgccgggcagctgggcgacggcgccgccatgtacctgggcgaggtgtgcacggcgaccggcgagcgctgggagctgcagctcaagggcgccgggcccacgcccttctccaggtgggccggggcgggcgaggggcgcgggtgggtcctccccgccggggcgccccttccctccgcccggcgcggtgttgggggcgtccggcggctactgccaagtggggcctcccctgcacccgcgggagcgcggtgctggcagccgcccgcgccctgtgcttatcaacccgccgaggaccttggagtcagctccaccagggacgccgctcatgtttaccgacgttcgctggggctccaaacccaggggcgggagccgggatgagaggttaggctaaccctaaccctaaccccgcaggtccccagccttcctccgatcgctcgtggggcgggccgcttcgtccagcagcctcgctctgcgactgacttcacggaggcctggccctgacttccctgcgggcagccctttttaaccccgaagtgaggtgggcatcgtttagatttctgtgggggggcacacaggtggtctaataaggcaggatctgggtccagatgccgccaggcccaccggggagccgtgcacgcgccacctgcctcctgtgtatagacagcgcttgggtctgttctgctcttttctactaaacaatgtacttactccatattctttactgcttttgtgaatgactaggaaagtgtacattttatgttcagagaaatgctaaacccgcatctcatccggcccctccctgtgctctcatcacctccccctccagcacctgaaatgcccctcggtccctcagcatcccttccccggggctccatctcccaagcaagctcctcagactgagggtcttcctcactcccccgtctccaaatccgttctgttctgtgtctgagggcaacctggctctggctctccctccccacccccagcgacctgcttagagttgacagcaccggccgcccactggagcgtttctgacccttggaacgtggtggaaatgctgctcagcctggggcctgcttgtcctgtgagcattttttttttttaatttttgtttttctttttggcgatcatcttaaactttatgttttcatttttggtgatattttaaagttaaaaagacaattttttttatgagagtaatctgtcgctggaagacactttttatgtttgaagacttgagtattaactcactgctttcagacctgagagctgctagaatatattttctcctaaaaattaaggagtcctttgacctttactcaggccctgcctgacatccccacacgtgtcctggggtccctggcctcaccagttctccaaga

SEQ ID NO: 70429 - DNA, 2528 bp, Homo sapiens
cggaggttgcagtgagccgagatcacgccactgtccctgggtgacagagtgagaccctgtctcaaaaaaaaaaaaaaatcgtaagttaaaaagtgttgcggctgtggagaaattggaacccttctgcactgttggtgggaatgtaaaatgatagagttgctgtggaaaacagtgtggaagttcctcaaataattaaatcaccacatgattcagcagttctgcttctgggtatatccccaagagcaggatctcaagatttgtataccgatattcatggccaaaaggcagaacaagtgtctatcagcaggtgaatggattaaatgtgatgtgtacatacagtggaatattattcatccttaagaaagaagatgctgatatgctacaacacggatgaacctggaggacgtggtgcagtgaaataagctggtcacagagagacaaatcctgggtgatcccacttacatgaggtacctagagagccacattcatagagacaaagtagaatggtgggtcccaggggctggagggagtagaggaatcgggagccagtgttcgatggggacaaagtttcagtttctgggtcccaggggctggagggagtagaggaatcgggagccagtgttcgatggggacaaagtttcagtttcacaagacagatttctggacatggatgggggtgatggttgtgcaacattatgaacgtatttaatagcactgatctgtacacttataaatggctaagatgggccgggcgcagtggctcatgcctgtaatcctagcacttttgggaggccaaggtgagaggatcgcttgagcccaggagttcaagactagcgtgggcaacataaaccccgtctttacaaaaagtaagacaagaattagcagagcttggcggcattgcctgtagtcccatctgcttggcaggctgaggcgagagggtggtgctgcagtgagccaggtttgtgccactgcactccaggccaagtgacagagtgagaccctgtctttaaaaaacaaaaaaagtggcttaagatggtaaatttattttatgtgtattttaccacagtgaaaataattgaagaaaaagggggcagtcatctggccctcagatctcacatccccttccccatgcctgtccgattccctggcctcggcagttctgcaggacatgaggccgaggccggggacccgaagacctgtggggaagggaatgcgagacctgggggtcagaagtggctgagtggcctgaggccagcgctgtcggagcctcgggcgggttttgcggggcgggcagctggcttctctgccctgcctcctcccactgtgggtgtgggggccccggcaggcacagaggagctcattcctcagctggcccgtaccggggcacccatcctggtgcaaaggctgttgtgtcccatggggcagggctgccccaggccctttgtccccactgtgcagtcacacagtcctggcttctgctgcggaaccctcgttctgggcaggaagacgggctgctgcgtgtgttcaggcccatttttaccagaggctgtgccgacaacctgctgggctgtgaggttgctggaactgggcggtgttggaggctcacaaggcacctgatgtcacctgggacgggcggttttcagggacgtgcaagctgctcacgttacacgcgttccctcctttccatgtgctgcccggaatcctggtgttgggtgacctcctgaccggcccacgtagtgaactctgtgtttggtttcagacaggccgacggtcgcaaggtcctacggtcaagcatccgggagtttctatgcagcgaagccatgttccacctgggagtccccaccacacgggccggcgcctgcgtcacgtccgagtccacggtggtgcgcgacgtgttctatgatggtaatcccaaatatgaacaatgcacggttgtgttgcgtgtagcttccactttcataaggtaatgccgggggcctttcggcctgtctacacgcacttgcttagagtcctaggagatttgggcctgtgctgctaggattctggtagaaacaaacccagatgaccgccttggcctcttctgaaagtccagcctgtccctggcagcctcagaagctgcctgtccgcgaagtagctgcgtcacgcccactgggagggatctgagtgcaaaggcatttggtactcagttaggacacttgtgctgagccctcccacgtgcccggccaggccctcgttgcagccagagatggccctgcgggagctggtgtgtctcaaagcaccagcagggggctccagggccacgggcaccagagaagggtccctgcctggtgcttctgggggggagggggtccctgagcctgaggctggggacagtgtccagagctgtttgctggagtttatgacaaggaactacttagacttgactgaggaaatggccactgaagaagcaggagccgcaagctgtgcgcggtgtcctgctcaggctttctgatctgatggtccagttgctcgttggtctggagtcctag

SEQ ID NO: 70430 - DNA, 2499 bp, Homo sapiens
aagaggaaaaactaaacattctaccttaatagccagcccagagaggtccgcattgtctggcacggggggcaggcccagtcggacgtccatgtcataagtgcggctgtgcacaagggccccgaagagcgagacccgggtgtctctctcgaacctgtcaccacaagggtcaccaaatgagaagagcccgacggtgggcaggccagtgcctggagcagcctccataacctgaagtgtttcctggatcatgctgtgacacaaacactcttctctggagatcagagactgaacgtccatctcaaacacactcaggtcgtcgcaatcatagccgctgtacggaacgtttctccccacatgcttgttgttaaggaagtagtctcgttttctcggcagaacttgagggggaccactccctgccagctgaaccaggaggtccaaaacagaccccacctccaaaagcggacagcaaggggctgcttccagctcctccacaagctcctccaaacggtcggccttggggcccaggccacccactctcaagtcaaaggacaacatgaggatcttgtttctcgctggtagttttgacatgtcaggctgcagctgttgagtctcatcttgaaaaagatttgtgaaaagagcattgtaggccaccttcttgaggctccgctttgccctcttccggttcacactgcgctggcccaggtgagtcttggcagccggcaggagggcctcacacaggtcgtcgaacagctgcgtgatgctggccatgccccttctcagctccgggcccccggcgtgtgggaaaacacctcacccgggcttcactcacgctccggaagacagggagtgagagagggtccgaagaggctgaatgacaggcggcctctccaatgccgaagctcagaactggtattttttaaaggaggtcttgcggttgctctactcagagtaaacacgccctgccctccccagtccaagcacgctgcccggcgcccggcagcccaccagaagccagctcggcgtttcttctaattcagtagccctcaacctttagggagtcacagaaccgtggcaaaaccgaagaacgaaacgcgcgcccgcgcagtacagcggacgaactcggctttgcacccgttcttcgggacccacgagaggagacggccaggagagggtgccactccgagggtcgtgggcagcggagagtctgggggctcagccgggtgggtcccgggttctggcctgcacgtccacccgttctccaggcctcacccgtggaaagtgcccacggctgccgctctcgccgcctccgtcgcgtcacagccgcgccagtgtgaagagcactagggcgggcgcgccggaaatacgtcacgggaacgccggcagcgcgtgaagttggtgaggcctgggccgcggcatacttccggcctgagtccggcaccgcgggtgagagaccgaggccgagcgtgctcagtaaaggaggcagagccagcgtttcgtttgagcgatgtttactaacggcgcaagggcggggagcgaagcgcagcggggcgcaggggccggaacgggaccgagcgtgggttgcatgggcctcgatgggacgggccggggcgcgatgggtggggcgggggcgaggtgaggtgaggggtggagcgggggaagcacgggtgggagagggcggggcgcggggattgggagtgggcggggttccgtgccccagagtcgagggagccgtgggcttggggtccggatcgcggccgcggggcgctggcgtgcggtgtcatttctgcggtgtaaatgctcccaccttggccgatttcaagccaccaggtgaggatggcactacaggaggagccgagaagaggcgcgcagttggcctccggcgctggagctggttcagggcactcccctgccctgccctccccaccgatctgtgcggcagagccaggccccagggcagggccatgcctccgcagtcagcctcacctgcaacatcttccactgaggctccagctgccctctcaggtacatcagggcctggacgtcctctggggaggccacagaggaagggcctaggctaggaggtgcctctccattcagcacccgggccaggatccctgctagctggggtgtggagttctggaccaggggcgaagacggaagcagtcactggtcctttccctcgtcccaccccgcagcacctccaccctgcccagcttacctcctccaggagggccaggactcggccccctgccagcccccgaagcattgcagccaggagtgcagcgtgggggccctgcaggccatggccaggccccagcgccaccagcaccaggtcaggctggaagccataggccaggggcagcaccaagcccaagatgcagctcaggaaaccaccggtcatctgtggggacagcagagcccagctcctcatctacggacacctgctggctctggcctcccaacctcccaatctcagggcccctggagtaggagcagggagac

SEQ ID NO: 70431 - DNA, 987 bp, Homo sapiens
agggtcaccagcaggagcaggggggcgggaggcggggacctgggattcatggtgggagtggccaccctgtcacttcctcaagcctgtgagcccacccgaggtgcatagggagaggctctgtattcgaggctggcaggctcggggtaggcccaggttcttaggtttctagctgggctgcccgccccgccccccatcgtggggcctgcccccgtcctgacctgtgcaccaggcccagctcctcttccgaggcctcgcgggctgacaaccgcagacacctctgttccaggccgcgctgccgcaggcgatccagggctgcggtcaggcgctcaggacgctcgatctcgcactcggggctggggcagatgaggagctcagttcagaggtccctccccgcaccccacctcggccaggtcccacttactcgtcccagagcagccgggtggccgtcatgtcctcatggtacacaagcgcggtccccatggctgcgccgtggtcaccctgggttcccaaacgccctcgctagtggtgcctgccactgcctgtccccaccttcggccgggagcagccggaggcctgggacctgcctggggcgcaggcgggcggcgggcaccggcctgggcgggagcgcacagaacctaggcaggctccgggatcccaggcgcgcagaaggcacggagcgaggctgcagtcgaagggggaggctccccgcgcctggcttccggcttcctcgcctcggacctgggtcccgccccgcgccctgctcccggtcgctatcgcgagctccgccccggagcgaggaaccagcgggcgcggaagcctcggcgccccgagccgccagccctcggagctgcgctgcggctccgcctccccattggccccgccccgatcccctccaagaggggcggggtcccccggccttaggcgagtggtcgccgcagccccacccgaacgcccgtggccgagcctgcccatgagagccccgttctg

SEQ ID NO: 70432 - DNA, 1175 bp, Homo sapiens
aggctccatggtagaggcagcaggactcgagtcttcacaggcaggggagggaggcagtcaggtttcaacttcacaactttgtgccagaaatgagggaggtgcctgggggcgatgggggcgcggcaaggcatctgggtcagaggggtcggctgggccggtggagacagacacaggagaatggtatttagcaccttcccagaggccactgacttgacctctgcaagtcaggcgggaggcgcctgctaccctctccaggccttcctcggcctggcccttcactcttggccgacagggtgtgagtcccagggtggtcggctgcagggcaggggcagggtgggtcctccctaccgcttctcccccacccgctggaaaaggtcagcagctccagttaccggccacacacttggtgccagggtcccgagcacgggaccttcctgttaacaaatggtcaggtccaaggttcacacctccggtgctggagagggcccaggtgccaggcgtggagagaggcagcagccccagctctgcccagctgtgccagtgcccgtgggtcccaggaccatgtgggggagggcgtggggtggacagtggtatggggagggggtgggcggtgtgcatcccccactcaggctgcaggaagagaaccccattgccaacctagaacctgaagccagtgcccagagctgcccaacacccctcgtgcccagcggccagcccaggtcggcactcacaagtccgtgaagtcatccagggtctcatcaggagtgaatacgtccagcagcccgatcacctgggggggccacatagggttgagaatgcagcagaggacacgggctggggcaccccccaagagtggcacaaccctctgggcaggaaaccccctctgcagctgtcattgtcatgccccactgtccaaagggcctggctctgcccactggcagtgtggcccagccctggcacacatacccactggcagtgtggcccagccctggcacacatacccacagaaaggttatttttggacggtgacaaccgggatcttctgggggaggggcaacccggagtctgggatggctccgaaccatccaaagggctcctgccgcctgaccctttcacccctcttcaccccaaccaaacagatccaggcccagggtggggacagcgctatggaaaga

SEQ ID NO: 70433 - DNA, 771 bp, Homo sapiens
gccaggactgcaggggctccgcgatgaccaccatggcaaacctctggatcaggctgaagccctgacccgtgacgttgatgctgcggccaccactgcggagggcagtgccttcgtgggctcggctggcaggggtggtccctgcagcctccgccctcccgtccccgcccaccctggccctgaccacacggggcttccaggtgcatgtgtgggtctcggtgggcaaaggggcaacgcggtgggacgtgctgagcacgagactgtgccgcaagtgggcggggggcacacggggcctggtgagcgtggagcctctggtgtgcccatctgggtttctaggaggaagtggatctggagtgcagtggggttttccggaggccgcctcccgctgcacagaccagccccaccacattcctttcagcacagtcagccaagggcactgaggaggcagctgggtgtggggagcagaggggggcggggggacaccagcctcacctggcaaagcttcgtagcggctcgaaggctcgcagtacggggttttcgcggtaggtgaagaagatgccggggttgggcacgggggaccccccgtaggagacctccagaagcatctggccccgtgtcgcctgggggccagtgacacactggagctgcgccccaaacttcgtcctgggggagggagggtgctggtctgcatcaacccctcccccgggaccagccccagcccgaccaggctggccccgccatcccctcagggccactcaggtctcagtaagtgcc

SEQ ID NO: 70434 - DNA, 1600 bp, Homo sapiens
ataggggtgatcagccaggaaaagatgctggctttagtgagagacaggaagattctacaagcccacgggaacctctgggcatgatcctggtggagggggttctatgcccagctcagccagggtcccccgctgtggctcagtggcctgtccaggggagaggagaggagggcacaggagtcccaggcctccaggagaggcccgtaggctacagccacagcccatggccctaccagggaggagcagcgcctgcccgaaggctccccaacccccgccgcgcccctcccctacccacagccacccgggggcaggtcccgcaggcccccgccttctaagtgcacccagtggcgccagcgggggcaggcaacgtccaggcccctcggccctgcgcccaggcctgctgccctcccctcccagccccgctcacccggcccagctcgctcacccggcccagctcggtggcagtggcagaggcagcctcagccaggcgcagctcccgggaatgaatggaatgcgcccgcagctgggaggggaatgcgggggcagcgcgggggcggggcccacggtcccctcggatctggcccggaccgtggtggggcagcctggggaaccctgcggcgcccctagccccaggaaaagcaatggctctgggcccccacaagccacccctcagccgtcccccagcttccacccagggaagacactcacccacccgccagggctgtaggggccccggtacaggaagaaggctctcctgtccctgccgggggctggcacaccctaagtgctcaataaacaccaccgtgtgccaccagggaaagcctgactcccagggtcctacaggcccaggcttttcagggtggcaggcgcggctggggtgacaccctacaggtggcagctgccttctggttcctggacaaacaaggcctcaggtgacctgcctgcccaggcccaggagcaaagggcaacccaccggaccagcagcaaagctccggcggcgcaggaggcgccaggcacagccagctacgcttcctgctgcctgtgttcctggaacaggagggagggcgggcagcaggcacttcctgttttgaagccctcctgggacccccacttacggggctggcggggatttcctcgggccctctggtgccttcctcctggctgaagctcggaggggcactttcaagaggccacagcaactccggctgctgctgggcagggaagctccccacttccatccagaccaggccacagcaactccagctgctgctgcccacaaagcgtctgcacaggcacccccccaccacacccccaacgctccaattcccagccctgatgtcccagaacccggtgccacagtctcactgcagaccactccacctgagcaaaagcttggcctgagcaacagcttggcctcagagaaccatgggagcctcacagcggctccatgggcagggaagctccccacttccatccaggccaggccatgggaagggtggcagagtgacaggtacggttgaaacctggctggacagagccttgcagacaccacatggcagttctagatacctccggcctccctgtccacatagccccagccacc

SEQ ID NO: 70435 - DNA, 1194 bp, Homo sapiens
aaaaaaaaaaaggaaaagaaaagaaagaaagaaaagaaggtaggctccactctgcctcaagatgtgactctccaggccctcaatagccacccctacaaccaaggttcagctactgaatcctgctcaggccccagagtccactgcagcctggccaggttgtgtgccagcaaagcacctcctcccgcagggccaggccccactctcctcccaccccaccgggatcctcatgtgccctgtgcagcgggacccggggttggacatgcagtgacaccagcaggggggcggcgggaagggaggtgagctccacagctgtgcatggactgtgctaccctgctgcacaggtaagggttaacccggccaaagggctggggagaggatgaggtttcggggggcagagggcatcctttcgacctgagactcaacagcacctttgtgaaaagggcaaaaggctgctcctctggcaaactcaggagccaaagcacagggcagcaccgggtctcctgagaaagctgggacccgcggggactggagactgcagctcccgacggaggtggcagccatggcggtggcacggtacccccagacctgccatcttgaagggacgccacaccggcctgtgtgccccatgcccactccctgcagcacacccccaggctccagcctccacgggcccaggccccaggcgtgggcgggggcagccaaggtcaggggaggctggcttctgtcccgcccatcccgcacgccctcgaacaacctcccctgagtgatcgatccactcaggaagccagaggcaagacccatactccactctcctggaggaggctttctgccgtcctcttccctggccctcaccgtggagaacggccatggatttcccctcccagagaataacaccatgatccctccaccctcagtctggggcccttcctggcccaagtctacctcctctgcccggcctctggcttctcccacctccatccatcttgccctcaacactgagccaggctccatctcctgctcacaagattcccgcttagctaccccagaaaaaggagtttcttccttaggtggctgtggtcacacctgacgctgctgcacccagggacctcgaggcctgaagtccagagccagaccagtgagttcacaccccagctctgtcacgttctagctggctcatgtgggccattcagaaag

SEQ ID NO: 70436 - DNA, 2353 bp, Homo sapiens
cccctgcctcccaggttgaagcaattatcctgcctcagcctctccagtagctgggactacaggtgcacgccactatgcccagctaattttctgtatttcagtagagatggggcttcaccgtgttgcccagaccggtttcgaactcctgagctcaggcaatccacccgccttggcctcccaaagtgctggaattacaggcgtgagccaccacacccagccagactgaccattcttaatgctaaaatcaaaccagcacaaagcagtcaggcccagtgggagggcaggcccagcttgggggctgctcttggccaggccaggctgtgggctctggcacgggaaccagagagggcaggggccagaggaggtgcatgggcagcggcccggcaggggccaagatggggatccaggcagcagccgccatgaagaacgaggagagctcgggcctaggcctgggagggcaggagggggtggcatgagcacctaggacatgggcggtggagaaggcagaggtcctagggctgtgcggccctccagggctcaaaggattggggtggacacaggccctgcgtggggtggggggggggcccggtgcgggggcgggggaagcagcctcggaccaagtgagcgataggctgccccaagcacaggccaaggcgcgtctgagagtggctgtcccggaacggggcgacaggcgtcacagaaaagccacggaggccccggaggccccgcagccagcagccagggggccgggccaaagctagcgacacacgcaaatctgcaattatcccagagcgctaaacacatcagaggaaacaaaacagacgcgccggcgaatcccagcctccgctgttttcaaaacaagcgcgaggggggtgccgcggggcgtggggctggggggtcggcaaggaccccggccgccccttcccgcagcgccgcgcccgtgggtaggcgcggggagggactgggtggagagcgcgcgggagacccggcgagggcgagaccggcggccccgccacccagccccacccaccggtgacccgggtcagagttcagcccgggaggcggggggcggtgtctcctgggtgggtctgcgagcccggtacccggccagagccaaaggcgggcacccggcctgtgtggagcgccctggactattcctcgcaggccgacccaggtggcacagcccctcccccggcgccggcaccgccagactccccggagggcgcagaacggttgcccgggagccaggggcaaagcgcgcccggggccaggaagcgcagggactaggcccgcgcctcctcggcgccgcccactgccccccgcgagcccaagctccacggccaccgcccgcgccctcccggggactccggcgccccgtccgcccctcggcctcgcgcacctggagggagcacgtggccgcctctgggacaaacctcaccaggccgggggcccaggacgcgcgggcgggtgggagtctgacccgagtaacaatgacggcggcggcgacagtcacacgagcgcaggagacgtcgtccccgcggggcgctcacctggcgtcgggcacatcggatcgcacagccggccattacctaagtcctccgagccgtggaaggggcgcggggagcagctccgccccgccgatggtggctccgcccgtgcccccggtcggtctcagggctcggcccctcccggcccagctgccaatcatgcacgaccctgcccggagcagcctcccgcaggactccggacccagggtcaaggccagactcacccgaggcaaaggccgaacgctcccggcacaacccgacctaggagctggggcggggcggggcggggcggggctccagggacagactgatgtggaggcctgagcctcgcttcagcgtctacagcggtccccgctggactctcggctgaggacccctcccaggtggaggccgtcgcaccccttccccgccagcctggtttcagggtggggttcctacttagggccagcctcccctgcagtctgggctctgggtcccagcaggaaaagtcaccctggctggtggcagtgatggggtcaccagcccaggatcctgggggtgccccatgaagccccagctcctcctgtcacttgctccagccgagttagtcacagcccccactggtccacacctcctgacacacccaggccacctggtacccagggcctctgtatctagccctggccctcaggcaccccctgagctcacctggccatgcccaaggggcctgccccagccccctctccgcctctgcaccaagtgcagcccctgtatatggtgcgtccctagactggggccccaggctgccctcccatcctacacacagt

SEQ ID NO: 70437 - DNA, 1307 bp, Homo sapiens
acacatgtgcagacacacatggctgggtgctgccggaaaagccctgccaacagggtctcaccccaacacccagaactcgtccccagtacaaagagcctgggagagaagcctcaggccggggcacttgggctaagaggggcagtggggctctcagaacccagcgctgcctggagccccgagggaggggccatgtgtggcatggggaagtggggtgggggcagggccgtctcagcaggggagaggggctgcgtctgcccaggatgagctgggggctggtgaggcacagggtgttgggcaggacctgggtccaggccaagggtgaggcagcccagggtgtgggctgggccccacaggggcaaacactcagggctttgggaggccagagggacagggatttcccagtgaggaaatgcccatctcagagtgggggcaggacagtgagtgggaggtgatgcccgtggctggagctgtgtggggaggtgggtgcccctggaggccaggtccagccccttgctccacgcggaggcttgctctgctcatggtggagctgaggacttcaaaccccacagggcctggtcgagagccactgggccccaggtctagatgtggaactgggggaccctccagcgagctttgctgggcctgggcggcctgcctggggcgccccaccttcacgccctcctccctaacatccttttctcctgaagtccctcagggtggtcaccagatcaggctcggtgccaacataggagtggggaggccaagcccctcagctcccctggccaatctctgaggctgagagggagtcgggggggccatgctggagcacctccctcccaccacctgccccttgcccctgtcaactgctggctccacttaaaatagcttctccccctcgctggtgggagggaggccctggtgtcaagccggtaaggctggagcaaggctgggcacagggcctgggctcagcagtgttctgtgccctccatctcctccaaagcaggccccagctctgaaaacacacctgacagggctgggatccacagagtcctcacctcctgctggtcctcaaaccccactctccatggctgggtccctgaaatacttggattaccctcaagccccccgccatccccccaagctgtggctcccatgccaccctaccacgtctgagtcacacaggcccaggcctcccttgcttcccccaggagagacccccccacactcctgcttctggcctgtcctcagagccccagaactcacctaggttcaaagccagaccccagctgaggacagagcatggaccc

SEQ ID NO: 70438 - DNA, 4629 bp, Homo sapiens
ctaccacagccacccacgcagcctgaggcatagccccctggaaactgcctcggccttcagcaccccactttggaccagcagggcaggggggttcctcctctgagaagtcctcaaagctgcctggaaggagcagacagtgcccccagacgccaatctgacagggggcccaatctgtctctgagcaggtggcatgctggctcgggggccccagaccacaacagaaggtcacctgggaagagagccgcagccctacacaaggctcgtgggcaggaaccgtcccagccacaggagcagacgcccttgcctggcccctcagggggccgtgttcacacaggaggccttctcagaggtggacaccaagcacttctctctcttgcgcttgctgcgggactcagctggggcagcatcaggcccagaaatcggtgctggacactgtgtctccacacagggccccccatggaagctgctgaccagctgtgccagaggggccggggccctacccccaggagcccagtccctgcctctgatgctgctgctgctgggaccctgctggcagagctggtggctgaactggggcagcacctccctctcctgccccaggcctgggccgggactcagctggcactggaatgaggaactattggctttcagaagccaggagaccttagggggctgaggaagagagctggacctgcccccaggcgccctgatcccagcccagggcagtctcctccctcacctagcctgggacatgaggcagctcaggtgtggccttaggggctacccccagggaaggccaccaaccatagcgggccacggtgtgggctggcctctgggtgtgaagggctccaggatctgggctgcagaggcgggactgtgcgaaacagaacccccagctccacagccaggccagccccaggctcctccccagacagacatccccgggggtggggcaaacctgcagtaccaccaggggcagcctgtcccaccatccccggcaccactgggcctggggccagtcactgtcacaggttcatgaatctcacagggcagggtggatccactgggggggtgcggggtgccagtgttcagggccagacgggaggggcccagccaatcccttcacacgcttggtcttcagagagaaggcttctgagccaggagggccactgtgtcagggcctggcttgaggccacacctgtggctgggggagcccagaacagtgcagggtccttccctggtaggcagagaaaggcaggggtccttacaatccaggggtatgggaagaagcaggccctgtgtcaagggatgtgaaaccacggaaaggaagaaggtggaggaacctcgaccagaaagagggaagctagggcagctgcctccccggggccccagagcctgagcaccccccaccagccaaggctctgacccaccctccccatcgtgtaattagtcagagacccagccccaccccacccacagccccaccccaaacacaaacagccactacccctgagggagggaggggctgtggccagtcccagccctactgaatctcccacccccagagaacctggatctgcctcagagaagggaggtcaaggctggggggccacttgctggccactgggtgaattctgagcagctcaccacctcatccccaaaccgtgtccaaggcaggctctgggcacaagaggttccccgccaacttccaaggagggcggccaggctgcagccagagggacggaggcatgagctgagtgagaactcccagctcaggggaaggcagccctcgtggcagaggcctggcatccaagtgcctgcctagctcagagaaggcacaatatgaggggccggaagacacagcctctcccagccagtgcacccctgcccacgcccgcgtcccagggggaccatcagctgtggctggcacagggtgaggcagggggcaggacacggtgagcacggacgacgtcctgggatgggaggaggactgtgccatatgggccctccccaccaccttccaatccaatctcttctgctccacttccctgggccgggtccaaggctctgggctttctgcacttggggccagctgccggctcctcctccccgatgtggtccccatgcaggccgccgggcacacaccccgggcgcacacacagcatggacccagagcgccaggtagccacagccctggccacacagcatcgcagatgactcctcacatagacctatctctggcctcagtctccccacctgcaggatgggctcacaggcgccatatccagagggggtcgtaggcaaggactggctgtcggaggggcttggagggaggctggtccgttagtcaggagctgaatagggagtccgttggggcaggagggccccctgagggaaaccccagtgccctccctagcagcctagcctcgctcctgcctgctcctccctggcacgcacaggtcactggcacagggtgtgtccctgaacttgggcctggagggtacctcagaggctcttcagaccaccattgagacttctcggggcgagggggtccctgggtggggcgagggggtccctgggtgggcccagagctcctcctgttccatggtctcccccagaggggcttgggcccactgcaggctcagcagggcctgctggggccaaccttggggctttctccaacccaaaggtgacgcatcttctccccgcccagtctgggcagctgcagtagaaagtggcagagctgcccggacttgcccgtcctcctcctggggccctcaacccacgtcccggaagtggatccttctcccacgctgcagcctcccgcttcgggtgactggacacggctggatgatccaaaataattctttcttggcaggcagccggtgggggagggggactcacattccaaacccttgtttttctcagtaacttccctcctctactggggcaaggaacccctggccagacctcaggcctcccagaccccccgggacagaggtgggccccccataggtaccgtgggaggactcagatgtgccaggcccacctgcttgcttctcagtcggctctggggatttctatgcaacatgcaaaaagctgactcgccacaaacctatgcctgctggccctgccctccgggagaccctcacctctggacaggaaagggagggctcctcccaccagctgttcagctgttccgtgccagggtcatctgggcatggggcaggctgagagcccccacttcccggcagcctcgctctcccacccgcaaagggctcctgaggaagctcaactttaaagcctcacaggctgcgccgaacctccaagcaagggccgaagtcagacattaagtggggagggcgggggggtccagggaaggtggggcacagggagccctccaggccgccgggatctgccgggtttggggcccaccctcaccctcaccctcaccctcaccctcaccctcaccctcaccctcaccccctgtcctgactctgccacagcccacagtgggcagacggacccctttcttcctttcccagggagcttcgggaagagaaatcaagggcctggcaggaagccccagggcgtccgggctctgagacccccagatgacagggggaggcgggctccccagatctgccgaatagcccgaccaggggcgctggcagggcaggggcttcctgcaggagcagggtgcggaggggcagggtcagcaggggacaggcagggctcgcgcccccgcttctgagactttctgtgtctcggggtgtccacccagacgccactctgggaaccgcgaggaggcccaggcagtggggtctcgccaggtgcgggtgctctccgccctggtccccccgcgccaagcaggccccagggggtgcggggacggcccccgggagctcgggcaaatccaggctcctgtgccgctgagcctggggccggcccggagcgcccgcaccgcgagaccatctccgctcggcgcacggagctcggcggctgaagagtgagaggcaggcgcggaggagggatccgacgcggctccggagggacgcgcagcccccgccgccgggcccgtcccccgagtcaacaccgggaagggagtggggcggcagcggcccgggcctcgccggatggaccgacggacggggcccaggccccgggagccctccgcggagccgcagccgccgcaggtccccgggccccagcgcggcaggcccgggcggagcggcgctgacggcgaagccccccccacgcccagcgagacgtcccccgcagcccagtcccccgagctcggtacctgcacgtccgccgccaaggctcgatggcgcccgggccgcgctcggcgctgcgctctggcccgcgctgctgccatggagacggggcctttgtgtggccgaggaggggccggagcgcgcgggagctgccggccccgcccccgacgagggagaggaggggagggcggggagaacaggagaaggggggagagggagagggaaagcggagggggagaaggagggggagggggaggggggagagggggaggggggagagggggagggggaagagggggagggggagagggggagggggaagagggggagggggaggggagggggagcagga

SEQ ID NO: 70439 - DNA, 1938 bp, Homo sapiens
gaggcgctgcagggttttaagcaggagagccacaaaggttgaactctggggtgcagctggggtggggatgacatcagtgatggcagcaaaggaacggatccgagacctttgttgcagaaggagccgtcagcctcgcctatgcccagagatgggatgcggagcggagggtaagcccgggactctggcgggagccactgaggggatgaaggtgtcactgctccggtggggaatggaggggggagatgtgagacatttactgggaaaaatcgaaagagtaccacttaggttatgcaaaatgctccatcccaatgtgaagacaagatccgactccgagcagctcgccttccctcctcggcctggggagcgcttctggagcccggagaagaggcccctccaggaggcggcggccgaaggccagggagagtgcggggcggccgagggccccaagcgaggcgggactggccccgagaggcgcagccctgcccacccgcccgcgcccgcgctcgcgcccgctcacctccagcgcctggcccagctccaggtcgaaggtgaccacgcacacacactccagccaggcggagaagcgcgcccagggcgccgccggggtccgcgccgcgcgacctgaagacgtgggtccagccgcgcccaggcagccgcgagcccggcgaggccctgtgcccaacagcgcgtccatggcggcggccgcgggttgccggggaaacgcgggcgggggcggcgcgcgtccgggccgctcctcagaacagtcgagcggccgccgcggcccagtgcggctcccgcgcggccgcgcgccccctagcgcccgagaagcgccagcggccgggcgccgcccagggcaccagcgagccggacgcgcgcgggccagagcggccggagcccactgggggacttccggggaagcggccgaactggggccttccagggtccacgccgtctgaggcccgagagagtcggttcggccccggtgttcgcggatcccggctcgcgggagcctcggggccaggccagggaggcagagcaagctgcagccagccggcgccgggctcgtcgggcttcgcaggtccggccagcctacctcgccccaccgcgcaggggccagcggcgtcgcgggcgttttcgtggcggaatggcgtcctcactgagcgcccagccaccaccgcggactcgcgctcgcttcctctggggcccgcgcggcctggggtcgtgtctgaccgcgggtgtccacgcaacacctctgcagtttcactttccgggggaatcgcggggacctggagcgaactcttccctccctcgcgagggccccgggccccgctgtggtccacagagcaccttgaggcccggcgtggaagggcgagtttggggctgtcggtaacttaatgaggcacgcctttgagtcgtgggcctcatgacgtttccgtggaaggcgggccgcatatactgtggtggtcccttcagattaccacgtgttggccagacgcggtggctcacgcctgtaatctcaccgctttgggaggccgaggtggggtggcggatcacgaatccaggaaatcgagaccaacctggtgaaaccctgtctctactgaaaatacaaaaattagccgggcgtggtggctggcgagcgccgtaaccccagctattggggaggctgaggcaggagaatcgtttgaaccccggaggcgaagcttgcagtgagctgagatgtcgccattgcactccagcctgggcgacagagtgagactccatctcaaaaataaaaaaataaaagattaccacgtgttgttcggatcatctggcctaggtgtggggtaggctgtcccatctaggtttgtcacataacaaaatcgcctaatgacacatttctcaggacatagcttcaccgttgagtagcacatggccgtattgttttttgtttgtttgttt

SEQ ID NO: 70440 - DNA, 1817 bp, Homo sapiens
cctcccgctcctgcaaaggagaccatggtgagggcaggagaagggcatagcctgctgaacgcagggtgtctcttctctaggttgtgaggctgaggctttttcacccccacttcctggaagttccctcaacggaacctgccagaaatctgccccttaggatgctaggggaaaagcttttgctggggaaaggctcgccagaggcatctgctataaaaccggcgaggagggtgctgctgaccagggcaggggacaggcgtcggggaagcccggggccgccagccgcagggccaagcccttttctcctgcaacgtctctggcgccctctaccgacaaagcctaacagcgccagctggcaaaagagaaataccgaatatttgagccgcccagatacgctttcgcagagagcatcggtgaatcctgggcaatacactgacaactggaaaaaacgtttagagatcccttaagtgctccatgttttcccaacatttacccacggctcgctctaacatctgaaataatagtaatcatttttgaaattattttgatggaattaaacaattccagcacttgttaaataggcacatacttaatttgcaaaacgccgtgcaagaacccgtagcgcacctggagaaaactgtctggaggcggctcaggcactccgggtccaggcaggacgcgggacggggaggggccaggcctggcgcccggggctgagcccgctcctgctgctcggggcgtccacgccccgcggcctctgggaggggcctgtggcaggagggaggcccgggagaacaggccctttcctgggccacgggggaaacccctgccccaggtgtgtgtctctcaaatgctgcgtcgggccacgcgaggattgttttgtggctacaacaaaattaactatgcttgcacaaaactttagccaatacctcaaagggaaacgtaaaaggggaaagacgcactcttaccccacccactccaaggcagcagtcagcacacccaagccctcgtgctcccacgcgggtttcaccgagtgccccactccagggggcccggagagccggcccaggtcccggccccgcccacccgcgcggccccgcccccggccgcgagcgtgcgcgccccaagcggagaccccgcccccggagcgcgtgcccgtgcgccgccgccgccattttggagcgatcggagtgccgcccgcggccccgagtcggtctcgagccgccggccggccgtgccggtgtccgtaggcgctgcgccctcggccgggcccatgtgtgtgcggcccgcccgaggccgcccgggctttgcctccaccagcgccctggcctccgctcgggcctccacacgggcctccgaagagctgccgcgacgcccggcccgcagggcaggtgagtgcggccgcccgccgctcagacccggcccccagtctgccagtgccccccaagtcacttctccccgagtcagtcagtgccccctccagatagttatcccccagtcagtcagttccccctccagtcagttccccccagtcggtgcccccggagtcagtgccccccccaagtcagtcagtgccccctccagtcagttcccccccagttagtgcaccctctagtcagttcccccagtcagtgccccctccagtcagttcccccccagtcagttcccccccagtcagtttccccccagtcagtttccccccagtcagtgccccccagtcagtgccccctccagtcagttcccccccagtcagtgccccctccagtcagtttccccccagtcagtgccccctccagtcagttcccccccagtcagtgcct

SEQ ID NO: 70441 - DNA, 1383 bp, Homo sapiens
acaagtagaatgtcccccacacctgcctgcagtcacacaggtggagggtgtggatccaggccctctcttcctatctgtcctgctcttccgcggtaccttactactgtttttgggaagaagcagcctttgcgaactttatgtatgtattaaattaaaatcatttatttattttttgagacagggtcttgctctatcaccgaggctggagtgaaggggtacgatcatagctcagggcagcctcaacctcctgggctcaagcgatccccctgcctcaggctcccggagtagctgagatgatagtcccacaccaccatgcccagctagtttttaaaactttttttgtagagctggggtcttgctgtgttgcccaggcttgtcttgaactctgggctcaagtgaccctcagcctcagcctcggcctcccgaattgttgggattacaagcatgagccatgtgcctcttttcacttctgattttggatttttacttaacttgtttgtcccactccaccccctttttaaagttagactctttttcctggtcttttttccccggtggactatgctcaggatcgacatagtcttgtttgttccttggttgtacaaatagtcattgtgcttcatgtgctcacgttgccatttttttccgggccaaatggaaatcaagcattcagcctatccagtggtatgttggtaaatgtttaacaacgggctttctggggaggaaaaaacctcctggtttgtaacacttgctgatttccatggcgttaatactcccaccacgttggagttgagctgccagggtgatgtcctgaaggtggaagagggaagagaggtatgagggctcaggttgggccaccgcggcgcacgccctctgtgggcacagtgactttatctctgtttccgtctctttacgctgagggtctttgagaatgaaacgtgctgggaactgttctagagcctttatgtggaataacttagtaatcctccccacaggggatgtcgatgctgcattttacgggtgaggaaatcaaggcatgagagatcatgtgagtggcctcagctcacaccgcagagctaggactttgatcataaatctttaaaagaacaaaacagtggctgggcgccagtggctcatgctgtaatcccagtgctcatgctgtaatcccagcaccttgggaggctgaggcaggtggctcgcttgagcccaggtgttcaagaccagcctgggcaacatggcaagatgtggtctctataaaaaatttttttaggattaaaaaaaaaaaacagtcagcttgggtaacatggcaaaaccttgtctctacaaaaaaagtacaaaaattagctgggtgtggtggcgcatgcctgtagtcccagctacttg

SEQ ID NO: 70442 - DNA, 1882 bp, Homo sapiens
ctgagagagtaagtgcactccagcctgcatgacacagcaagactgtcatctctttaaaaaataaaaaaagatggagaagatataaatatatatgtagaccaggagttggcagactgtatctatgaaaagtcagagagtaaatactttaggctttgcaggttgtaaggtctctgttgcaacggctcaactctgaagttgtagcatgaaagcagctacagaaaatagtaaacaaatggatggggctacattccaagaaggcttcatttatacagagcagcacctgtgcttcgcgactctgctatccttgcctagtggcactgccaggttaaacaccgcctcccgcaacctgttagccttggaggtcagggttctcctgcagacctggcagaacacctccatgaccacaggctcaattatgggaggactcttcttgaaagtggagaatttgcctgagctgtctgtgctcaagagaagctgcacttggtttgggtggattgggatcaggtagcagccactgaccctgcttaattaaagccaggggctgctccagggaggtgaggcccacacgctgcctcttcctaaggcctcacatgcagctagccctgcttctgcggagcagcccttggctgaaaagccactgtgactgtaagatggctggtcaccttctggagtcagagcactgcctgcccaggccacagcagagggcgccaccccagggctggaggcagcagcagtcacatggtcagccctagagcctggggatgctcctggtcttttcgtgagctcttgtctagtttgcttgccaagatctggattatttgagaaataagacagaagagtcagtaagagacaccaagctgtcgctttcattactcataaagcagtgtcatttataactctgagctgtgggcttcctcattcctgattgcagaattagaactgctcacccagtgggaagcagcagtgggtcacagcgggcccccaggaagcaccccctgccgcagagagacttgctgcactcagggcagaactgaaagaaagacagcgtctccaccaagggaaacactgggaggaagggaactttgccataacagttcctgggccactgaccatccactccacatccattgtccatctcctgtcatggcttcttcctcttcttcggttgacttcctgtggtaaattacactctgttaaaacagcttcctgagatggagttcgtgggtggtgatgtttagggcatcgggcctgcgtgtttgagaccctctgattagaagttcagactgggcattaccccctgggctttgggagcctccgtgttgtcctctagtctcacaagtctgatgtagcaagctcctggctcacgtgtgtcacctgttttctctcctctctgagggcatttaggttcttttctaagccctattgtttctcaatttcccagtaatgtggaattattccatgggtcaggacaggggatccccaaagagcatcattgagccaagagagtttcatagtcagagcttgggcgaatttagtaataggtaagtacaaaatcaagcaaacagaaaaatattgactctaagggaaaagttgtataagtaagcaaagatatcccgagtagacaaatgaggtcaacagtggatatccatttctttcatttgttgttctgggctccctgaacccttttagtctgtacatttgtgacattagctgagggaaatttctcatattgtttctttgatattttccctcttttctctttctgggacttctaatgaggtgttagattactcaaattaatgctttccttatttttgcttttaatgttttgtactttgcctttttggcctacatctgagagacttcttcatcttttaagttc

SEQ ID NO: 70443 - DNA, 1854 bp, Homo sapiens
tgaagagctctcagacacgggcgctgaccccacacacagacctcctgggcatgggcaccgaccgccacgctgataccccacccagggcttggcgtgcagggcctggaccgtcaggcgagtcgccaggaatgctcttctctctactctcgacgcttcctcctcaaatcctcccagtttcaaatcaaacaccgcttctccatgcaccaaacccgaactccaccccctctttgcaccccgccaagaccgccgggggcttcagacggagcaccaaggtcagaggcgggctggcgagccgcgggtccgcgcccctggagccactagagccacagccgcccgcagctggccaaggagagagcccgtcccaccccaaggaggccgggcaggccgggcccagccttctctccctgccgccaccaggcccgcgcggccacgccgcccccagcggacgcccattctccccacgggctgtccggtcggccctggccttcagtccccgcccggcccccggccccggccctcagtcctcggctcccccgaccccggccctcagcgcccagcccccggtcctcggccctcagcgcccggccctcagtcctcggcctcccgacccagcccccagccctcggcccccagcccccggccctcgaccctcagacccagcccctggccctcagcactcgaccctcggcccccggccctcagcgcttggcctcggcactcaccgcgcgggtgcggcccgaacgccaccagcacgaagtagtccgcgagccgcgccatggcgagggacgcggggcggcccgaggggcgcgggcgggctccgcggctcggggactcgaggacggcgcgctcatggcccggccccggccctggaccgcgcaccccggacacccctggttcgctccgcggcggcggcggcggcggcggcggcggcccaggttcccgccgccatcttcccagccagccggcccgcccgggcgcgccgtgcgcctgcgcgctgtcgtcaagccctgagcgggcggggcctgcaaccgcgcatctccattggtccagagggtgggagggcggctcccgagagcagcgccccgcccatcgctgaccactctggggcccgagcaccgcccctcgggccgggcacctggactacggctccggcgggtctgacgccctgacccgggtcggctgtggtgtcggcgggaggcatgggccaggaccacagctgccctcgccgttgggactccccgcacaggagcccgaaccccacccctgggccgtcccaatctggggatcgggtccccagactcctcgtcccccgcccctctctgtccagcgggagaaaggcgggagaagcctaggcgctgcctaccgggccccccaaactagaagtcagaggaggcgcagggccatcacctcaggggctgccagcctggcgatggggaacagagagagaattcaggccctgcccttggggtcccaggctgaagagcccccatctaggccaagtgagacatttaacacagcttaaaaacggcacgctcatgtccccctgtaaagagcaaatgttctaagcgtgtgaggcacatgaggccacggagcagggggctctgggaaagctgcatcccccaggatccctgacagtgcccacccctctcaagggcagggctggccagggccacccctgaagtggctcagggatgagcatgagcccagagcagaacatgctgggagagaaggtgcaggagccagcctggtgcagcagggaaacccctctgagcacagcaggccaaggtctgttttttgttatgttttgttttgtttttgaggcagagtctcaatccgtcacccaggctgaagtgc

SEQ ID NO: 70444 - DNA, 1480 bp, Homo sapiens
cgtcgggtccgagtccgccccagccgtgggatcagctcggacgacggttcgccccccagaaccccgctgcagcgtggggaagtccggcccccgcaggctcggggctgcgtccccaccagaaggcgcttggagtgaggctggcggtcccgcggtcccgggccggtcgccgagcgctcccagcggggacaggcccctccaccgctcccttcgccgcagccccctccccgccccgagggtggctgggcccggaggaggggcgccccgccccgtccgtgcatccggctccgccccttgctggaaaggctacgtattcagccctggaggtgccatcccgggccgcgactccgctccaggcaggacccccaacccgcccagcccgctccgccttgcgccccggacccgcggccgaccccagacccgctgcccgcttcgcgcccgaggcctgcgccccgacggacgcccgtgcccagcttgccacgcccacgcccggcgccccgaccgcggaggactccccgaggtgccggcggagggggtggctcgcggctcaggctgcccccgacgtgcccggctcaccgccccctcccctgcagccccgcccgccatggcccggatcccgacggccgccctgggttgcatcagcctcctctgcctgcagctccctggctcgctgtcccgcagcctgggcggggacccgcgacccgtcaaacccaggtgagtccaggtcttgggccagccaacccctctggcccccgcagggaagcagagtgccgggggccgcggggccgccctccctccacgcctccacctgctgctaggactcccctcccaaacaaaggcccctaccccaggctcaggagcgcctgagcagggccagaggcccctctttctctgcctccctacacagggcagttgctcctccccacacacatgggcacagcagcccctcttctgggggtgtctgctgggggaggggaggctggcggtatccctggccggcctgtgaccaccctaaagggagggcagaagccgagtcaccctgagccctgagagtggtgacccgcagaggctgggccgccggggtgccctttggccaaggaggtgccggttcccgggacacgtgacccgggccactgagatggtcccaggcccaagcccagaggggacgcgggcttcccctggccgtgctccaggctgtgtgtggatgggggctgtgggcttcccctggcagtgacccaggcctgtgtagaggcaaaagtgggcaggtgtgagttctccaaaaggctgagccatctggttgacattctccatctgcctctgcagggagcccccagcccggagcccttccagcagcctgcagcccaggcaccccgcaccccgacctgtggtctggaagcttcaccgggccctccaggcacagaggggtgccggcctggcccctgttatgggtcagcctctccgggatggtggccgccaacactcg

SEQ ID NO: 70445 - DNA, 1948 bp, Homo sapiens
gcagcgtcctccttgcaggtaggatgccctcggggccatacaggcctgtgggagggcatgtcatggccaggccctggacagcccttgcagactagactacctctgagtcagggcctgcagatcccccagcctaggtcagagcatgcggatacctccatccctaggtcagagtctgcagtccctccagagcccgtcccccaggtcgggacctgtcaaaaccccgtcccagggctagaggcctgctcaactacctgagtcagggcctcccacccagcagagcccactgccctcttccaggtctcagcccgatctcctacctgtcccaccaggtctgggaggaagcctctctcccacctctctcagagttctgtcccccaccccaggtcagagtccagagccttacgggaaatggatcaccgcacaccttcctacccccacagcggcctgcaggacacgaaccgccgccccctaccccacgccaaggcctggccctcactcccaaccccggactgcgtgagtgccgggcacagagaaaagaggacatagggtcccgcgccgaggctgggggtgtcccaccctgggtgccttcacctgggatttgcgtgtagagggaagcgaaagcaaacatgaagacggccgccacgccctggaggaagagctgccgcgggagccgggagcccgccatgtccgctacgcggcccgctagagcagggcccgccctccgcgtccgcccgcccgcggcagccccaggccccgcctcctcaccgccccgcccgcccaatccgtggcagccccaagccccgcctcctcggcccgcccgcccgcccgcggcagtcccaggccccgcctcctcaccgccccgcccgcccaacccgtggcagccccaagccccgcctcctcggcccgtccgcccgcccgcggctgccccaggccccgcctcctcaccgccccgcccccccaacccgtggcagcccccaagccccgcctcctcggcccgctcgcccgcggcagctccaggccccgccccaccccgccccgcccgacccacggcggccccaaaagccctcccgtccaaactggtggcagcccaaagctccgcccacccccccctcccggaggcttcgaccccgccccgcgactcttccggtgagctcccgctgcgcggcgccggggttcgcctctctggcttttgcccacgttacgtcatagacatgcgcgcgacgccgcgcctacgcattttcctgggcgggaacagcaaaatggcgccagaactagtggcgggctgaggacgccgtacccctcggaaggcagccctgcggtccctttgccgcccgttccctcccggacatggaggacgtggaggcgcgcttcgcccacctcttgcagcccatccgcgacctcaccaagaactgggaggtggacgtggcggcccagctgggcgagtatctggaggaggtaagggcggcgggggagtgacgcggggtgggccggcgggtggggctgcggggcgggggctccgggcccggggctgtgggcgccccaccgtctccacgcctatggctatctggcgctctggccgcgcaggtcctcgggctccctgcttcttttcaaactccatctctgcctccccaaatcatcccttgttggattagcgtggacctgtcattgcaggtttctacccgtcagcgagccgtgaatgattgagtgggtggtgaccagccgtttctctaacgtagtggaatagactagaaagcattattgcttttattgcagttattgcgagcatgcttgtgtgtttgagaggtctggatcacgatgtcagaggaattttttatcttggattttcaaaccaatttcaagctattgccatgctctatcctgttagcgattagtgtttcttccatgtttgacagccctgtctagacctgtgttaagctgtctgctccat

SEQ ID NO: 70446 - DNA, 3418 bp, Homo sapiens
gagtccagccccgaacaggcctgtgatcagcagccgggttcgaagcccagggccctggggctggccctgcccacctgtctctgcagggccctgccttgacaaaagccaggacctcagatgcagggcctggcctcccagggtcccagggaggacccgaggcttgagctgagagagcctgtgccaagctgtggggctccgagtcagcagcagcatggatctgatgctcctggaaacaagcacaggcgtcaggagccagaagggaaggcccaggacagtgcctgggctgcccctgcgacttgagaccagccacccatctgaaggacccagcccacgttcaggcttaacaggcatttgcagctgctcacctgagctcagaactccacctccaccaaacatccacacctgggcaaccacacctgtcactcctgtcctctacctgggatcaccagcctgtcaccgcaccctgccctgcacctgcacctcagcaaggtgaacctcttgctgacggaaagcattccaagtgcatgccttgcctgaactaaccacgttatctatttgcaataaacccatttcttaaaaggaggtgggtaactctctggcttgcaatccccgagagcaaccgattcctccaacactttcctgttacctccagccacttcaaccaaccgcggccttcctccacactcccagcagaaaacctgcacgacctacccccggagctcagactctgcccgccggctgtgtttaacctctcctggcagagacgcacgacacttccacccgccacaaaaccccaccctcctcacatccaggcttcccagcagctcctccgggctcacagccgacgccctgcctttgcgttggtgacctttgagcctttcccacgggcccccgcagaaggtttgctaggtggaggtctcaggactcccggtcactgccccctcctgctgagggcaccctcccgaggactcactgcacccccgcccgggcggttctgggtttgtgccctccccagcaaggccagcgccctcgtggccagaaaggttccaggaccactcgaagcgccgcgcgagcgcgttataactgtgcttggccgcgagaacaccggtgcctgctgggagcctcccacgggcgccccagcctcgctccggcctccagcgcgccctggggtgtgccccgccagccccgcgcagtagccggagctgggaaactaccccggagtccagcgagtcctcagggctacctcctcccctcccagccccggcgtccgcacctcgcggcggggccgcgcgtcagtggaccaagcacgagaggaagcgccgacctccagctccctgcgctctgccccgccggctcagggaaagcgggcgccacacgctcacaggcagggcgcaggcgtccccggagctgcgcatgcgcacacgggcgcagccgctgacaggctctcagcgcgtgcgcggaaggcggagcccgccgggggtcacgtgttcatcgagacggcccccgcctccgcagccctggatccttccgctcccgcccaagcactgacaaggtttcgcggcaaaggagctttattgctgcggcggcagaacgagctctgcgaagggcgagggggcggcgaatggcgcgcggtcggagagtacgagcgcctcctgcagggcgcggctctgcgggccgctgagcgcggggccgtcccggtgcacgcggagccagggggtccctgcagagcgaggggctgttagaggccgcgcggccggagctgggcgggggtgcggggccagcagggcgggggcggcgctcaccacggcgcagcctctgacccacgtcgaccagcagctctgcgcccacccccaggcggagcggctccccagcgcggctgcgcccggccccgagctcgtgcagcaccagcgccagcggcagcgcccggaccagctccacggtgcctgcggggagaggggctgagaggcgcgggctcgggaaggggcggggcctcgggaagggaaggggatggcggaggcggaaggacggggactcccccgacgctcaccatctgcgggcgccagcagctcctcctgctcccgggcgcgaggcagcagctgccggcgttctgcgggacttcccgagcacagggctcgggccagaccgggatccacgccctgcgccgccagcatccgctcgaagcggccaagggccgagccgtcgtccagcgccgcggccacccgggcagcgccctgggcctgagtccccgcgtgtccgctgagccagagcagggcgccccctgcgggcggggacgggtcttaggcgcggccgggtcggggcggccccagcgggaagcaccccccgccgcctccgctcccctacaccccgtccccctcaccgagcgtggtgaccaggtcccttaagtctggcgggcctgcgccgtccatgcagagcagcgcctcctccacctccagggcgtggcccacgcagcgacccaggggcttgtccatggcggtcagcgctgccgcgacccgaagccctaggctggctcccacgccaacctgcggagaggaggctcagcgtggaccccccatggcggggccttctgcagccggttcttggtcgaactccagcccctgctgcaccctgggttgccagccccccagcatgaagtcagggaaggattggggtggggaagagacacgagtgaagtgcgacacctcgccatggggccaggaggaacttgtacttggtctggggcaggaacgccacagagggcttccccaggtccaggccgggccagccttgacctctaaagtcacagcaggttaggaagccgtgaaggagggagggacttcgggcagaagagggtgggactggggttaggcaggactgctgagtggagggaggcagtggggacgggaggggtgaagggtaggctgggcccgcatcaagacgcttgcccagggaaaggccacaccgctcaccagcgtctttgccagctcccgggcctgctcctggttggggaagacggcggcccctccgaacttaacgtccaccaccagagcggacagcccctccacgagtttcttactgagaatggaggctttgggggaggcagaggaggttggagacaatggagaacctggagcttcttgggagagttcggggatgccgactttggggtcaggggccctgagcattgagggtcaagtcccttattatgggggtggcagcacctggtgggttgagtatcaggccaccccacatggtggtggtcaggcatcttgtgatgggggtaggggggcacacggtcaggtgacgggtaactcctaacgagaggcccttgacttgagtttggaggtcaggagcctgtgaacatgcagaagcaggccatggagtcaggtcacctgtgatgagtggcaggctgtccacggtg

SEQ ID NO: 70447 - DNA, 4074 bp, Homo sapiens
gaagccttggtagggtcttggaggctttgggccaggcttgaggttgggagctgcctgtggatggactggttgctgcatgtgcggtataggctcccgtctggaaaggaggtggtttctaaccttgcagccacatgccgccagggcaggtgcgaggaccaggctgaccttgtcacccacaccccctgtggaatgcttgtccacaagctgctggcgccaggcctctggccactccagctgctgtcccgactgagccagggcctgggtcagcaccgaggtctcctccagatccatgccccgaagtcggatggccatcagcatggcccctggtatgtgggggtacgcgtgagggtggcagcccacagcggtggggcaccctggggccggtgctggtagtggggcaccgtcgcacccccagggacccaaagtctctcgggctgacctcccagtcggggtcaggaacgcccaaccctccccacgcaccgatctgtgcgccctgcgcgctcccattcaccacagcggccacgaagcccctgatgtccgcttcgctcaggcggcctccgtctcgcttcatgcggatcagctccgggagctgcttgggctctggcgaagggtcgggaagtccctggctcccttccccggagaagtcaccaggcgcgggtggggccccggttcccggggtcatcaaggctgccatcgctccgggcctgcggggatgcctgacacgtccggggtctgcggcctcccggcgtcggtgtctgagccacgtgctcctgtcccgacccctttcccgtgtctctccggtgtccgcccctcggtcccgtgtctgtgtcgccctcgtccgtgtctgcctcccgcttccccgcctcgcgacttgagccccgcccgtacctgcttagggcgctgccctcgcccgcttgctccggatcccagcccaggtacccggcctcgcccgcgggtcgggaccgtagggttcagggttcgcgcacagcggtccactgccggcggcggggcggcggcgccccaggacggcaggcgggtggggccgcctggagggcggagctcggcagtcgccgcccccgggaagccttgcacgccgcgccccggccaatcccccggtgcccccggacacgcggaacttccgggccgtcggggcccggggccgtcggcgggggtgatccctggccggtcccgcccggcgtgggtctcgggcgtctgtggctcccgagagtccccctcccgccctcggtggggtctcgacgttcggacgcggcgcagcgctggggtcccggcctcgcccgacgctcgggccccgccccgctgggttcggagttgggacacggccccagccgtggctccaccccaggccttgcgccaggacgcgcagagagagagagagagaggcggacacgatgcggactcgcagactttaagcaaacacgtgtggggccgctcccgcctggcgggtcagttgtccgcgtcggtcaccagcggggccaggtagtccgagtgccggatcccgaaactccagccgcggggcttccggtgctgcgggcccggagacaccgctgacctcgcggggccggcatcctctccgcgccgggacccctggacccccggggactctgatcccatcactccgacctcaggccctccccactctcctgactctgacccttgaccctgggctccaggccacctgatccacgttgtaggccgcgggccctggcttccgagtgttgtcttgggggagcgaagtccgcgccagaatcgtgaactggggggcccgggacttgtagacccctggactcacgacctgataggcgcaggggcccggggtctgcgagagggcagagggtgctggctgccgcctccactgccgcggaccagggaccccctgcgtccgccccggcccctcccccaccttgctgaggtcctcgaagaaactgccagccgctctgcggccgtagatggagcaagttggggcggagactttgccgatgacgcgcggacccaagagcgagggcaccgtataggccgcgggacctggggaggaggcagggctcgggggtagtgggtctccgcggacaggcgcagggtggtcccagctcccggagggcggtccccggtctcgagtgggaaggcccacagttctgggatgggccgttctgacctcacctgggctctgctgttccgcctggacaccccagtttcggggagcaatggtgtgccgaggcgcactggggtacgtcgcgttccccgctcgctccgggaagtacctgcctgcggggcggatcaagggtgtggggggctagaactgcgtgggagcctggtgggtacccgagatggggtcctgggactagtggggagtctgagccacgatttatcaaagccccgtggggttcggggtttgggatttgagatccggatatgggggtaccgaatatgcggtgttagggtatccgagggggactcggggttcaggtcgggggttcccaggtgggcctccctggaggcagttcggcgttggggtggccaggggcccgggggtcctgaccaggtcccggagtgaggaagggcgctgagcggcgtgggcggccgtagatggagtaggcgggggcgccgtcggtgccgcgcacggtcatgcgagcgggcaccaggtggcctggcccggggccgcacgtcgtctgctgcgtggggaagcgcgcgccgaaggtgaaggcgggggcgcgcggccgcgacgggtcatgcagggcgtagcctgggagcatccgagttagcgtctggccgggcccagccccaagccccatctgcaacacggaccctcccccggcacagaccccctctcccctctagcaggcacggttcagccccgagcgcaggcctccctggtctcttccccttccctcccccaggcgccgtcccacccctcaatcccggggcctgccccttctaccggtgttgggcggcagcttgtatttgggcccggggcctccgtagtgcgccgcgatggggccgcggggccggtgtggccgccaaaggcccacccaggcgtccgagcccatagcgcgggtggggggcgcttacggctcgcagcacctgcggacagaaggcggtggccgcggcccctgcaccgcaaattcttggggagcgcactttcccactaccctgggatcagcgcggggcggggcggggcctggaccgtatccctggcgccagcaaaacaaacgcgagcttccttcccggctgtgtggagcttggggccgggagcggatccagggccatcacccggactccaggcgcattaggcagggacgtgaactcgcgggggccaagtctagacccagacttggtgaagggaatcacctgggggtggggtgggggcaggagattttcgtgctgttgggaaagggtgccccgggaagggcctgcgtgggggacccggtgccccgaggtgcactgacctgttgtggtagctcctagcgtgggaaaacaaagcgacgtggctggacatccccgctccgccccgcccacctcccagaccccattgtggccctttcccgcttcctggcaaccgcactgactgcctgcccccccaacctgggtccgcctcccccttccccaccacccagtgccgccgctgggcctctgtgtggattctgtggcacgggtgggatagtagcctgggccacccagaacgctggcctcacccttacccaagtttcagtatacccattctggaataggacaaatctgcagacaaaagcaaggatgggaataaaggaactgaataatgcaaagcacacactccatttaattatgtgtagagagaggacttatctatttaagtccatgaaatattcgcaaaaaaaatcatgtattgggccacaaaataatcacacaaattgaaaaaaagatgtgacacatgatttgattacaatcaaatacaattctaggcaaacaaaatgtaaaaaaaagaagaagaaaactcagcctgggcaatacagtgagacccatctcgacaaaaaactttaaaaattagctgggtgtgatgatgtacatctgtattcccagcta

SEQ ID NO: 70448 - DNA, 3309 bp, Homo sapiens
cgagcttaagaggaaacttgggtagctgtgattctgagatcaggaacctgccgggaatcctgatgctgcacccctgctgcccaggcctccctcagcgacggctgagtgtccacagccctgtctgccagcagtcagcgcagggcggaggcctccgagtcatttctgcctttcacatcttacacaactgcactgaatccaacagcctcgcccggaactgtggctgcaaggggatctgtaaaacacagtattgccgcatttgtattttaggttctaaaatacaggaaaataaacaaaaggaggtgagaatggaagctgaacacaatggaccacatccagcacagtggaaaatcaagagtcctgatgtgagcacagcaggcttgagatgtcgtctgccacccagtgatgttcatggcagacgtagcggagaggtccaggtcggagatgctgaactgagaggcgtgcacaagccgtgggaatggatggggccgcttagtgcaggggtcaccaagtccagccacctcctgtttctgtaaataaaattttattggggccaggcgcggtggctcccgcctgtaatcccagcactttgggaggccgaggcgggcggatcatgaggtcaggagatcgagaccatcctggctaacactgtgaaaccccatccctactaaaaatacaaaaaattagctgggcgtggtggtgggcacctgtagtcccagctactcgggaggctgaggcaggagaatgacgtgaacccgggaggcggagcttgcagtgagccgagatcccaccactgcactccagcctgggcaacagagccagactccatctcaaaaaagaaataaataaaaataaaaataaaaaataaaatgttataggaacacagccacatccttttattttttaaggttggttttgtgcagacttgagtagttgcaagagactgtgtgacctgcagaggcaaaaacagccgcaatccagctcttcgcacaaaaactttgctgcccctgactgagggtgtgcacgtgggtaaagagccccagggccctgcagtactcccgggctggagacgtggcagaaacaagcactctgatatgtggatcataaacaagtgacagcctccgacgctcagcacttaggcgtctcagccaactttcatgagttaggttgtgggatgtttgataagtgtagcttctcaagtttctgtcatcctcaccagggacccttaagctggtggactcgtatttgacatctgcggtgaggtcctgttgtattccaggaagacttaattttccagactataatagattactgtgaaaccccagcataattaccttacctgagctaaatattaaaatagagaccaggcctgaagaacccctgagcagacaaaaccagttaggcgttctaactgacctcaaccttgcctaaatggaaaacgtaagtgaaacttaactggagtcatttctgataaatggttatgtgaggcagaagtaaaactcaactccagccaatcctaagcggccagctaacgctcaattgcgtaactagggacttcccaactagacagaccaaatgaggaagttgcataactgtaaccaagtgatttcttcagtgtgcctcctgattttcttaaatagacagacaaatacttatctctgacatttttgtcactagcctgagaaaaaaagtgtttatggccaggctcacacctgtaatcccagcactttgggaggccgaggtgggtggattactaggagttcaagaccagactggccaacatggagaaagcccatctttactaaaaatacaaaaattagctgggtgtgatggcgcgtacctgtaatcccagctactcgggaggctgaggcaggagaatcgcttgagcccaggaggctgacattgcagtgagccgagatcacgccactgcactccagcctgggggacagagcaagactctgtctcaaacaaaaaaaaaaaaaaaaggaaaagataagaaaaacaagtgtttatatgaagtattttctcagaaaaagagtaacccaaatacttttcaagtccatgtggcttgattaatctttaataaataagaatattggtgatttagtaaaaatggatattctacctagctttgttaatcaaataaactcatattatctctgttacaaaatttgtcagcaagaaaattttgtatatatatatatgttttttttagtagagatggggtttctccatgttcgccaggccggtctcgaactcccgacctcaggtgatctgcctgacctccgcctcccaaagtgctgggattacagacgtgagccaccgcgcccggtctttttttaactgacatcttcattccatcatctgaagaggctgcaatctctgggctcaaaaactaagatcatagtcactggtagtcaaaaaaaaaaaaaacgaacaaggctaaggtcataatttactccaaagattaacctttgttaaattattttgtttccatagaacaatactttgaattccccatcatgcaatgcaatctgaaatgaacaacttagcctcaacagtgttccaaactagaagctcttgataccttaggagcttaacaaataagagcttgtgttcttgataagaaaatttccttatcaatacgttagaaattgttttccaaaatttaaagactcttaagaaacaaatgtaagtctctcatgagatagacgacgccgttggttgatttaatgggttaaatcttggctcctggggatctcagctgcagggagttgctgagtccttggtggtttttcttacagtcattgtgtttacccagttccttcattgtatcctctcaagggtttcaacactttccagcagccactctcacatcaaatgattgccatcaggattaaacaacttacagaattcaacaccccaccacccaggtctatgatggtgatcacctgtacacgactctgcactccagtgactacgtcactcagtggtaacagagagcaaagctctaccatctggtcatcctctcagcttgcccagtggggatttgttgaagtaaatttttttttttttttgtgacggagtctcgctctgtcacccaggctggagtgcagtagtgcgatctcagctcactgcaacctctgcctcctgggttcagcaattctcctgcctcagcttcccgagtagctgggattacaggtgagtaccaccatgcccagctaatttttttgtatttttagtggagacggggtttcaccatgttggccaggctggtctccaactcctgatctcaggtgatccacctgcctt

SEQ ID NO: 70449 - DNA, 1306 bp, Homo sapiens
ttgccttttctgcttttaaccatcctcctttttggggggttggggggacctagttattaacagaaaaaaaccctttgctggtgtctttttttcttttttttgagatggagtctggctctgtcacccaggctggagtgcagtggcgcgatctcggctcactgcaactccccgggttcaagcgattctcctgcctcagcctctggagtagctgggattacaggcgcccgccaccacgcccggctaatttttctattttcggtaaagacagggtttctccctgtcggccaggctggtctcgaactgctgacctcaggcgatccaacacctcggcctcccacctcgaggcgatccgacacctcggcccaggtcgcacttttttgcccgttttgatcccatcctccaactgcggccacagccggaaatgtagagaaattcgcgctcctggggccggcggggctggcgctggctcacccgctccccgggccctcccagtcgccaggtttgcgctcggagcccaggggctgcgggttcacagttcgcccgcgagtcgctgtcaaccctccaggcgcggcccgggggcgctcgcgcgcgctgccaacggagccatccctgacgcgttctcagtctacggcagaaaacgccagtcggcgccggaccgtgactccagggtttcgcggaaataaattttaatccagttttgaagccaccacttggagttccagggcagttgcaccccgggggtgcgctgccgccaccgcttcccgccccctactcagtctctaatatttatgggtgtcatctccatcctctgaaggtttctggaccccaaacttaaccaagaggcagagcctgagactgggacagagaataagggcacggtctagaaagccttccctcaacttgaggtccaccttaaggcatggggcccaccctcaccctctccctgtcatctaatagtcccagggggagctgggaggtgagttacctgaggctcagtagggttcaggctgggtgccagggacactcctaggccatctccttgctgcttgagtaagggagaaatccccaggcctgctgtgtcccagaggaaggaaaaatacacacggtactttccagggagccctgcctttgtcccagggactccaggctctttttcttgtctgagcctcacctggcacctggcccgagacactcctgagatgggattaagcaaggagcaggtggaggagcccaggcttctccctcaggaagcaagtgctcacatccaacagaagtacctacatgccggcctgagccagggctagga

SEQ ID NO: 70450 - DNA, 1838 bp, Homo sapiens
ggcgggatgaggggtgaggggtgaggcggggtgaggggtgaggcggggtgaggggtgaggggcgaggctgggtgaggaggcgggtgagcggtgacgtgagcgatgaggggtgaagggtgaggcggggtgaggggcgtcgggggaggggcatggggtgtggagtgagtggagtcgggtgagtggagttgggtcgaagtcaagggtctggcttgaggttggtgccaccgcgaacgctaggacagggtcaggcggagcccagccgtcagggcgcgttgggagggccggggcccaggggggcgcggcctcgctcacctccagcttggcccgcgctccggtcctgctctggcgcccccagcggccgcttgaggaacaaggccgctcctcgagagggatgccccgccctttccgttagcgaaccctccccggaagtgacctctcgccctcattgggtgtcctcgggaaaaggggcggggcattccgcgctgctcccacaggtctgcggcgtccgagtctgggactggcaggtgcggtgctggggacgtcctgaggttgagggagaatcctgcggagatgaagagcttcccggcctgacagttttgcccccacctccttcttgagcttaaggatttatacgcagggccccgtttgcctgctgtgtccccagtgtccaggacagcgcccggtaccaaaggtgctggtaaacatttgtcgaatgagtcgctgaacgcccagctatttccactgtcacagcgatcatgtgtggcggacattatgtggcatgtatcttacagaggaggcagcccgggctcagggagacgaggcagaggtgcacgcaggtctatgtgggctggaaagtgctggggcctcccgggcgctcctggtctccaggcaagaactggaagcagagccactcaacacctagaagggcagtgacagaaagctctggctgggaggaggctgaccagaggccagtctgagctcagccttttttttcagagggacgtgggcaccctagaagggtggtaagtaggcgagtggcagagttaaaaggtctctggctgccgaggcgggtggcgacggggccggccgttgctgttgtttggctgagtggtggacagggtcaaagccattccaaggtcgacttgacagggcttggtaatgtgggagggagggagaaagaagcaaggggctaatggccggggtgataccactggcagagatgtggaagagtgggagaagctagcttggaaggttaactttgattttgaacaccttgtgtttgagaatcctgacaaaccttagaccccctgaattttctctcagggattctgattcttagcagcctgattgcagaggaggaaaaatggctggggttgagccagacagttctgggcaaggagtgagcattcgcttgtttattgaggaggctgctgcctgggccacactccctccgccagctgccaggttcctgccccggttgaacccggttttctggccatccctttccacctgtgagctgctcttcatacttccatttgcttatacagcccagagccgatttctgttacagcagcccagagaaacatgaatagggaataattctttttttttttttttgagacggagtcttgctctgttgcccaggctggagtgcagtggcacgatctcggctcactgcaacctccgcctcccaggttcaagtgattctcctgcctcagcctccctagtagctgggattacaagcacatgccacaacgcccagctagtttttgtatttttagtagagaccgggtttcgctatgttggccaggctggtctcgaactcctgtcctcaggtg

SEQ ID NO: 70451 - DNA, 1033 bp, Homo sapiens
attttagcagccgagccaacctcagtgaaggagtgtctgttgctacaggtcatcctgcgtgccctcttgcagacatgaccacctggcgcctcaagacttcaggcctgggcctgcagcccctttccatgctgacaagaagctgcggggcccgtgcagggttgtgcctcagccaagaggggtgcctcacacatgcccctgcatgggaggaggtgggctcactctccagcagacagacaaacagaaatggccccagggaacaggtgaaggttctgaggcaagtatttattccaagcaaacacgtgggcgtggacagctatctcagagcctacgtcactcagcagagtcacacatttcaaagcaggtcacacaagtccctcatgaacagtcttccagcttcagcccttctcttgccacctctgtggtctgagctgggggagggggagggcctccgagttcccaaacaaaacacaggtacctaagggctgagagaaaattacacagccttatttttattagtatctatcaagaaaaaaaaaaatcaaaattcccttcctgctccaaccccacctccaccacctgggccctcagggagcagcatctgcccagcgaggacctgctgccggagctgtccttggagcctgggcacctgtgcacggccacccctcatgcctgtgagctgccacaggtcccttcctccacagtgtggggacgaaagggcagctggcatttctccaaccttcagctgtaggccttgggaacttggaaaagatcagcaatgtccagcagggctttgcggatgtggtttccaaagcgctgggcgttctgtgggagccaagagttcagatgcaccttcagatatgtacccacccctctgttcccacaagcaaggatgcctccccagccaaagacacctgtgttcctgggcagccccaggtggcaccccttcctcaggcctgagctgtggcaggagactcaccgtctctgagcttgagaacttgctggagatgtggaagaagatcgtgttctcgcctgc

SEQ ID NO: 70452 - DNA, 1837 bp, Homo sapiens
gactgggcccgtactgggatgtactgttccagccggccctctgggaagactccgtacagctggggccccagcgaccgctccgcaagtatggcgaacatcacgctttctagcaccagggagtccacgccctgaaaaaggatggacagcaaaggggccaaggcaaagtggcacagggacacacatgagggctcgccttcctcccaccagagctgcgacttctgatccaattgcctggaggctctggagcacaggctttagcgttggtctatttttatttagagatgggggtctcactatgttgtccaggctggtctcgaactcctgtgctcaagtgatcctctcgcctcagcctcccaaagctctgggaatacaggcccaggcttcggtgtaatgaggtgttactcagaccgtgaacctcggtgtcctcaactgcgcaacgggaacaatactacccgcatcgcgtaagcgacaggccctaaagccactggtgctgcggcgctcacacccccctcacctgcaagatggctccgtacagccgcagaagcacctcccggggctcctcgccaacgctgggcaggtggtccgggagcgagcagcggaagagcaggttgctgaggcctccgctgcagacccacaccaggcgcgctcagcccgcggccggccctacctgccgcggccccggccccctcccggccaggccggccccgccccgccccaggcgcgggcgcaagaggggggcgaaaacatggagcatcctgagggccccgcggctgacccctgaccccgatccgcgcaccggagaggctgacccctgacctcccacctcacggggtaaaccctcagctcctcgggctgcactcggcgccaggccccgcccaagtactcccggcaccattggtaggctcggcgctcggcgtcacgcgacagcgacgaggcgcgccgccgttttggggtagtgtccgggcacttagactgctgcaagccgtctttggccaggcagccgccaacagccccgcttccggccacagctgtcgcctcggccgccatggcgcgggctcgaccgggccccaggccaggctgcgctccgctcccttcggacgggctcggttccttccggccgcgctcggctcctcttccggccggcctgggcttctccggtcatactcgggtctctccggctctattcggctcacggctgcggcgctcggctctctccgtgccccggcccgggggctctttccgaaggccgaattccgcagatctctgccgggccccgcccctatgggcaaggaccaatggtctctctctgggcggggctgctgttggacggcctgggccaatccgaggcgccggaggccaatcagttggcggagcggcgcgtgcgcgggcgaggaactgcccgggcgcggtagcgtacgggaagaccggagaggagctgcgtctctgccccgtgggagccggcggggcggcggggcggcggctgcagctgcagctccggcgcgagggctcccttgccgggccctcttccccgacccctggggcgctccgacaaggaagagccgtccagcgcgcgtccgtcctgagcgtgggtgaggcctggaggaggcgcgcgcgctaggcagggccgcacagcgcgggcagagtgcgggatgcgggcacccggtgggtacgcagtaaacatttgctgaaggaatgtgacccttgggacagttccgatgactccagttgcataaatgcccagtctacacggggactccctggccggtagagccgcacctctgaatgaggagtcttttgctgccccgcttgagatgcgcgtcttcattcattcccctct

SEQ ID NO: 70453 - DNA, 864 bp, Homo sapiens
tgtcacccttatcctcaccccagcacctttacgtctgccccaggctccatttccccctcttctgcctggatcaaaccaccctgactttcctgggtcttcgtgcaacagcctgctccggccgctgcctcactgcacctgcaaatccacttgcacccacacccaggccagggtttttaaacagaagcctcagcagatccctctctctggccagctccctgttgaaccaggaagcaggtccctgttgaacctcagcatgacccgcccccacccctgcatcccacttctgctctgggagcctctgggttcctgggcgcacctgctgcccttccctgtttgtcactgggtgacctcccgtccttgtgggcgctcccgggccctggtctcgggccttctgaggacttgctctcctggtagcggctgctgactgtgagcccagagagcaggcgtggctgttgaccttaggtcctcccagaacctggcggatcgcctggctcccaggcaggaggcgctgcatgacgcctccaacttccgccaatctagcccaaggatggcgttctaaataaaacgcgttctacagaaaagtgtttattgcattcttctttgaaataatgtaagcataaaagtaatctgaatattgaccaatagggttaattgattaaggtatatttacctaattgaaatattgggtagatgtgaaaaaaagttccaatgtttgtaattacacagaaaatttctgttatgctattaagtggaaataaatttctgggcacagcagctcatgctactgtgtaatcttagcaatttgggaggccaaggtgggcagatcccttgagtctgggagttcgagaccagcctgagcaacaa

SEQ ID NO: 70454 - DNA, 897 bp, Homo sapiens
gcattacttgagtttctctaatgaatatgcattactttcgtaattaaaaatattcagaggtgccaggcacagtggctcacgcctgtaatcgcagcactttgggaggccgaggcaggcggatcacctgaggtcgggagtttgagatcagcctgaccaacatggagaaaccccgtctccactaaaaaatacaaaattagccgggtgtggcggcacatgcctgtcatcccagctgctcgggaggctgaggcaggagaatcacttgaacctgggaggcggaggttgcggtgagctgagatcgcgccattgcactgcagcctgggcaacaagagcgaaactccgtctcaaaaaaaaaaaaaaaaaattcagaggtgaatttaaacattgttccattgaaacgttccctgggctcccccttctggtcacttgggggacagacgagcacacagccaaggaggggccacagggaggggaggggagtttccctgcaggagccccctcttaccctgtcgttcacgcaatcacttgggcgccggatatcccctcttccttcctaacgcacctgaggggaaaccacagaatcaacttgtttgtttgttctgtccatttcaaaacactcttagccccttcgagaggacactgagctccctgaggaagctgctctgtgggaatggatggctgccagcctggtgaatagattatcttaggctcacaggaaaggggctgttttgtaaatcaacagtaacagtgtgtatgtcactgcaaatatgcacgtatatgcatgcttgtgtgcacgggtgagtccttgtgtgttcacgtgcgcacgtccccggggggcacgtatccccggatgcatgtgtatgtgcctccgtgcacgtgaatgtgagtgtgcatgcgtgc

SEQ ID NO: 70455 - DNA, 1377 bp, Homo sapiens
cacttgccggccattcctgtgaggtagcctcgggcagccaggacttcggccacggtcacctcctccaggggcaggcccccccgggagctgggcaccaggacgccagggtacatgcccatccgaaccgggagccggccggtcaggagggcggccctgcgggacaagtcacagagtccctgagacagacagaaatgtggccttccctagagagagagacagacgtttttcccgcccccctgcaatccattgggaggaaagggatggagggtcggggcggggaagaggcgcggccccctctttacctagagggtgtgcacagagacacaggcacgtagaagtctgtgaaccgcagccctcccgccgccagctggtccaggttgggagtggtagagctggggtgcccatagcagcccaggtccccatagccgaggtcgtcggcaaagatcagcacgatgttgggcggacgggcaacggccaggccagcagccagggccaggaggagggaccgcggtgcccccatggacatgggaccgaggggtctgtcccaagagagggagggctacttggctccagcaggctctttccgataccgcagacccaggcgccgcccttccctgagaccccggacccaaatactccccgaccctgacggccgcctcctgaagctccagagggccggggcccgacagtaccgggagaccgcgggctgggacggaactcctccaggaccagggcaccttcagattctcgagcggagatctgatcctcctcgcctagcggtccgggctcagggtcgggggcgtaagtcacttggcgctgaccagcggagtcgggccggggggaaggcgctagagggagcccaggaggagccggtaccgggctgcgggcgcttccgcctcggccccgccccgtgacctgtgacccttgcggggcggggccgggggcggggccgggggcggggccgggggcgggccggggcgaggggcgttgctgcgcgtgctcgctccgaggccgccgtgtgcgcctgaggctgttggctgcggtcttgaaacgggctctgggagcttcctctgcgcggtcggccctggctgaggcgtcccgggctgcgcgcggggctcggcgctgcgcagtgtccggtgtcctctcggtccggagcttctccagaggaggagcggctcgtgcgcccccagacctccggtactgggagactcgggccctcctgtaagagacctgagcgcggagcgttatgggcacccggtgaatgagcaaatggcagggaaaaccgtgcagccccatggactgcgggctcttccttcacgactagcaaaagctttgacaccctttctcctgcgtacgcgtgtctgtgtgcgtgtaagc

SEQ ID NO: 70456 - DNA, 549 bp, Homo sapiens
gccagtctctgccagcgagccccttgatgttacattccagtgtggtgtctgtgcctgtgtgtggcggggctgggggcaggggtgcgctgctggtgcttccatctggagccagaacagaaagctgctcggtggcccagaaatctttgaacctgtaattggagctatcgcagctggttggcgctgtgaattggagtttaaaaggagacaatcaaaggcactttattctctttcaactggaagctgggaactaccccaggaccggccccttcttcccgagaagagcctgcttagggttgtagtgttacgcaaatggtggccccttccccctgggctctggaggccgctcaggggttgcccacgtgacagctgcctcggcccagccctgacctcccggcctggaggaggggatgtgtgtgctgccagctatgtttgttcaaagccaagctctgcaggccatcctgccttttggagatgtgagttctttttctgcattgacagagccccaattggaggcagcctgctggggttcgggaagtggctctggacgcc

SEQ ID NO: 70457 - DNA, 2071 bp, Homo sapiens
tggagctgggtgcgtgtcttgggggtgcccttgcaaggaaccctcaggggtcccgggaggcccccagatccatgcatgtgcttctgtcctggagagctggtgggccaagcaaacctctcctgagtgatggtcactgggggccatcggtggtgtgtctggatcaagggtgcatgcaccctccctctgcatgtgaagggctcaggcctggggttactgtgtccccatctctgtgtccccacctctgagagtttcccagcgactccacccctgtacggcctggacccctgccctgtgctgagctcagcagaggcccagggaggcaggagcttcgccactgaccttttcctgggccggtgccctttcctccttccttggccttgttctgccttgctctgactggtggcttagagtgtggaagggacttggccccctgttctcagcccgcggagggtggatagggcagggtccagatgggaaatggtttcagagatttgggccctggttcagacagtatgggagaggggaggggaaggagaggtagggggatccacacctgtggcgggagcgggtcttgagctcccccacgtggtggtgaggaaggttctggtttgaggactgtgtggagtgaggggcatttggacctacgtctgaagctgacggggagggaggggggtttaggctggagtcagaattggagagcagcaaatgttttttaggtgtttgtcatgtgctgggccctgtgctgggagccgggatcacggaggctcagctggaagccttgtgggagcagtggctgtgacgggggccgtgtgagcgtgggagctccctgggctggcctgaaggagtcagagagggcctcaaaacagaggcattgtctgagctgagtcctctaggtggtcagcggctggggctgaggggacagccgtgtgtgcagggtccgtgtggcgctctacagctgtgtgtcagcacggcctgctctgagtgcctggcacagttttagcacttctacacgtataagtcgttgactcatcccagcagtcccaagaggtggggccacttgttgttattccatttctagggggtcacatggccctgaggggcaaagtcttgtttgcaacacaggcagcaagttctatgtgagtgaaacgcctgcatggggtgaggggcgaggctggtgtggggaccacggggtggtcaggtggcatggagtcaagtgacagtgtggcatcatggcggagggaacccagccgcagtgtctgattgtgcaggttgtgtaggatcaaagcccgggctgggcagagcagagcaatggagaggagggttcaggtctgggctccagccagcagccatggtgtgtgtgacctggggagtgagtgtcagaggtcccggggtagacgggagtatttcatgagtgggcagcgggagagggacctgcggaggctgcctgcgaagggcagggagtgggagcagtgacagtgccctctgaccttggctgcaggccctgctggccacactgcgcagagcctctgctctgggatcccggggccgagttctgccagaggccagagtgcagcccaggaacaggaacctgcttccaacaggcccagatctgctccccccaccccccaaaaaaatccatttccgggactggagtggggacagaaaaggacttaaaggttagggaggggacatagtccctgtgcgtgcaggggctggtgcccagagccggtgcctgctgtgggatcgggaggcgagtcctggtcacttacccagcagagagcagtctcccacggcacctcctggcaggcagagggtggagctgtgagggagggaatggagaagcgaggtcaggtgtgttctggaggcccagcaggagcaggccctgtgccttccctcccctccctccttccctttctttgcagtaaggtcagcacttgggtgggtagtaggagatggctgtgttgggcattttctcttcagctggcttttatgtgtcttattaacaaaactggaaaaatgagtttgtgttatgtaatccatacaatttgtttggttgacaacatctgaaaac

SEQ ID NO: 70458 - DNA, 1371 bp, Homo sapiens
tgagtagttgtttgttcattcacgcctcacatgcattcacgcatacatgcactcacgcatacatgcactcaccgcgtgcgtacagccactcgctcgctatgcattcaacagctgaagcctgaaaccctcatttattctttctttcgtgcactcattcattcattcagtttatgcgtgtaagtacgcgcacgtgcatttttcatgcattcgacaagatcgcgtataagccctgccttctccctctgggaggcttccagagcggcctccactcttgctgcgcgctggccttgggcccagggccttaagtcatcgcaaacgtttactttggggctggctgattaaaggttaaatgtccaaacctagaaaccgccgactgccgaaggggccgcggcgggcgaggggcggggcgcgggcgtggatcgcagcccccggcggttcccgggtctctcttcccggcagccggggctgggcaccaggcggcgcgcgggcttgcgggcaggggctgcagggaggaggagaggacccgcgcccgcgggggctggcggaggcggggccgggcttccggacagaggccaatcgctgccctcggggcctccagcgccggctctgggccgaggcagccagagcgcggaagaggtgcggggggctgtagggggctgcaggggaccgtgggcagtggaggaggcctgggcgcggcggggggccggggggcgcagaggctgcccgaacgcctaggaggtctcgagggtgggtggcgtacagcggggcgggggcgcaacccagaggccgaggctgggggctgggggaggggcgccggactggagtgcaaaggaggggcgaggggcgcagggggctggaggtcagaggttgcccaagcgcgaaggaggggaggggtgcggggcgcgggagtaggccaggagcgcttaggggtgagtgcgccgagccagggcaccgagtgctggggaatacaggccgtccaggcgcggcggggcgcggggagacggaggctgccggagtacggaggacagacggggcgcgggcgtagggctgggaggcttggggaggggggcgcgggcccaaggcagaggctgcgggagcgcggggcaagggagaggtgcagagcgtggagggggctcgggggcgcttggggaggatgggcggcaggccgggtcggggaggaggggcggcgagaggcgcaggggtaggccggggggctgcactggagtgacgagggagggggcacctggccggggggcgcgggcagaggcagcccaagctcggaggaggtgcagatactggcgtccgggagcgcaggggtggtccagggagtggagaggggtgaccggggggcgccagctggggtggaggaag

SEQ ID NO: 70459 - DNA, 993 bp, Homo sapiens
gtcgtccaccacccctggttgatgtttaacccccttggctggctttaacaagccaggttggtttagccaggacccgcttcacctctgatgtttccttttagtgctttgccatctgtacacccgctgcctgcccccgtggctgtacattcccacttgcccttgctgtgttcatattggaagctgagcccagcctctcctgcactgtgaaccgccattgcagtggtccctgtacttcacacgataagcctggataatgtcttcgttatctttttggtgatgctttcccaagtacgaggttcgtgcaaaagtaataactgcaattaccaacctagtatcactgaatagttttttctttaacaaaggttttgctcccggacgaatgaacgagtgctggctgcttgttcttggggctcaacaatgaggtgcagacagactggggagaaggggatttatttctccaacgggttacagggagaaggtcagattaactcaccaggtcagctcaaagtgacaagttttttccagggtttctatgcattttaagctctatgcccacgtgtaggattgcacctacgagcgggagtatttcattcggttcctgtctaatctttaactagggtctggggtctgggaagttttctctagacgcttaatcttcagtgagccctggtatgacgtgtttaacttgtgcatcatcagaattataataaagcgttagtggaaaaactggttgctccggctgctaatggaagcctggcctgccacagtttgactcaaagggaacctaactctcaaggagccataatcccagcactttgggaggccaaagtggaggattgcttgtgcccaggtgttggagaccagcctgggcgacataggagaccccatctctatacataaaagaaaaattagtcgggcatggtggcttgcgtctcttgcctcagctactctggaggttaaggctggaggatcgcttaagcctgggagttggag

SEQ ID NO: 70460 - DNA, 467 bp, Homo sapiens
taaagcatgtctgctcatgtcataggtcttacaggtatggaggaaagttgaggtttttaaatttaaaaaaatataaaaaagaagatgaacacttctgaatcttcttttttttccttttgagcatgttctctgggtggggaatgtgctatggtttctgaaaacaaagaagaaaacatgtcatccttctgttccaggttctcacgatggtctaagggaatgtgatttttttttttttttttttttaatggatagcatgatagtggcatggggtgacgtggaggccaaggacagagggtgaggtattcagcctggagatgacctttaacctcaaggctttcttccttttaaaatgtttgcagattgtttgttttttgtttttgtttttgtgtttttttgagacacagtcttgctcttgtcgcccaggctggagtggcatgatctcggctcactgcaacctccgcctcctg

SEQ ID NO: 70461 - DNA, 2615 bp, Homo sapiens
caaaaaaccctcagaaccaactgttcagataacaaaaaatgactttatgattacattaggcccacccaaataatccagaatcacctccccatattaagacacttaatttcatgaaatctgagaagtctgttttgccatgcagtgtgatatggtttggccgtgtccccatccaaatctatcttgaattcctaagtgttgtgggagggacccggtgggaggtaattaaatcatggaggcaggtctttctcatgctgttctcgtgacagtgaataagtctcacgtctttctcatgctgttctcgtgatagtgaataagtctttcgtgatatgctgatctcgtgatagtgaataagtctttctcatgctgttctcgtgacagtgaataagtctcacgagatctgatgattttgcgcaagctcttttctctttgcctgccaccatccttgtaagatatgacttgcccccccttgccttccaccatgattgaggcttccccagccatgtggaactgtaagtccattaaacttctttcttttgtatattgcccaggcttgggtatgtctttatcagcagtgtgaaaatagactaatatacaaggtgacattatacaaggtggttaagggttgactggtgtttcttcccccacaattcatatgtggaagatctatcccctctccatctgtgaatgtgaccttatttggaaatgcagtgtttacagatgtcattagtttagatgaggtcatcctgcaggaggataggctgtaatcccatgactggtgtctttatgaaaagaggaaatttggacacagacacacacagaggagaacaccatgaaaccatggggcagagactggagtgatacaaccaaaaacccaggagcacctggagttgccaaggtctggaagaggcaggaaggatcctcccctatagcctcctgagggagtacagccctgagacaccttgatctcagcctcctggactccaggactgggtaaggataagtatctgttgtttaagcccctggtttgtggtaacttgttatagcagccacagaaaactaattcagacatattcatagactccagggattctgatgtctgtatcttgaacagcatgagggatcattattaagccattggcagggctcggttctaattgtggccatggattgcctttggtctgttggacacgtccttttctctggaacagccatggcaactccatgtgattagattaggatgggattctagggtggagatcccattccaaccatgggtggacatttaatccaggaacggccaagtccttcagccataatgattggtaccaagatgggtgatatcgtttggctgtgtctccacccaaatctcatcttgaattgtagttccataatgtcctaaacattagaaacggtaaatgttagctaacatggcaaaagggactttgcggctataatgagttaagaatcctgagatgagatgatcctggattatcctgatgggttctaagtaatcacaagagtccttataagagggaggtaggagtgtcaaagtcagagaaggagatgtgaagagggaagcagaggtcagagagagagagagagagactggaggatactgtgctgctggctttgaagatggaggaagaagccataagccaaggaataccacagcctctagaagagggaaatctcaaggaaatggattttcttttggaacctccagaaggaaccagcctgctgacaccttgatttttcgacttctgattaccagaactataagaaaaattgtgttattttaagcaattaagtttgtgacattttgttacagcaccaatagcaaactcatacactcctttaatggtcttttaacctcaggtcctctctctctctctttcttctcctcctctttcccttctccttcttctttttctctcaatctctctctctctcattctctttctctccatctgttctctccagaagggcagatgaactttttatttacatgggggctcttgagtccataagagagaagtcagaagctgccaggtctcctaagtctagggcaggaaggatagtatcagcatcacttctgcggcattctgttggtctatgcaaatcagaggctcatcctagatccaaggggaggaaaaaggctccaacttgtagctgggctcatttggaaggtaatgggaggacttggcagctgtaagacatgtaccacatctagacttcaacctacagaaaagtccaaagatacaccaacagcagcccaagttagtcaactgaagctggctcaaggctgccccctttaggtggagactaaccagctccctgacatccttcagttaactgcaccttcctcctttttgctgcctggaatgtctacatgctgcctggagctatggcagccatcttgtgaccatgaggcaaaccctatgtgcaagagcaggaagctggaaagaacctgtcagccctggattgcttcctctgtgacccccattacctgggagagaacacatctttctcttgtttaaggcgttcttattcccagtcgccctctctcccctgtataaccctaaaagcacaggagtacacttgtgactgtgacttaa

SEQ ID NO: 70462 - DNA, 3303 bp, Homo sapiens
cccaggctgtagtggcatgatggtggcttacagcaacctctgcctgattctgaggtgggaggattgattcaagcagtccttgaactgcagtggataggtggtgtcttagtgttgggggatcgtggctgtgctctccggggaggacgcgaacgaggggtgtgtctcagggtgtgtgaggggacacggctctactggggggcaggggaggaataaggccatggggagggatccggtgtggccagcagggcaatggccgcggaaggggacaggacggggcgtgtcttggagggtggcgagaggcacggcagtgctgctgaggcaggagaatagggtctggaggcagggaacctaaggctttccatgccgacttcctagaagtaaattgaaaggaaaatcctaactttccttttttttttaattttaatttttattattattttttgagatggagtttcactcttgtcgcccaggctgcagttcaatggcatgatccgggctcactgcaacctccacctccagggttcaagcgattctcctgtctcagcctcctgagtagctgggatcacaggtgcctgccaccacgcccggctaatttttttgtaattttagtagaggcccggcctaatttttgtatttttagtagagacgggatttcaccatattggccatgctggtctcaaactcctgacctcaggtgatccacccgtctcggcctcccaaagtgctgggattacaggcatgagccacctcgcctggcgggaaaatcctaactttccatgcctaagtaacaaaaggaccgaaggcttccctttgaccttttctattgggtagatagtagactggctgtctgcaaccaatcggactgatttcgggtctagtcttcgtgtgcaactttgtgacttcaccctagtctctgattagttgggttttgcaaccaatcagatgtttgcacaggagtgtgacctttgtaacttcaccctttggttggctgctgcctgcaaccaatcagactgatcgcgggccaccacttcagttacatgaggtgagcatgaagtggccaatgggaaacttctagggggtatttggacccaagaagattatgtacccgggcccttgagccgctgcttggtcggctcccacactgtgacgtgtccttttgttttcaataaatccctgctttccttcttttgttgcttcattctttctttgctgggcgttttgtccaattctttgttcaaaacgccaagaacctggacaacttgcagtcacgaccctctaccggtggcactggggcgcaaatgaagctgggaatgcaggacccggcgcatctgaggaagtgcagcggggcatggcggtgctagagggtggggacatggaggcggcacaaggccaaggcgccgggggatggccagagggaagtaacggccgcgcttgtggtggagatggggacgggacagagaagtcttggggggtgaccggggtaggcacggcggtgctggggggagggcgcccaatgaagcccacgggggggaaaggggcgtgtcttaccgagcgtgttgggggagtcacagccgtgcttgggaggatggggtctgggggaaggacggggcgcgtcttagtgggatgagggggagggcacagccgtgctgggaaggcaaagggccggggggcgggatggagcatgtcatggtggggccgaagaggcggggggcgggaaggggccttcttagaaatcgggagggcgtcacagctgtgctcgggaggacggggcgttggggagggacagggagcgtcttagtggacccggggaacacggccgtgctggaaggcatcgagctggggggttgggggcgggacggggtgcctcttaggaagtggggcgggcaaggctacgcttcgggggatggagccttggggcgggacggggcgcgtcttagtggggcagagcggggggcgcggttcggggcgggtcttagggagcctttgaaggccgaatccgggcagcggtgtagctgggcgtggaaggcggaggacccagcagggcgtgaccggcccagtttccgctccctccgggtcccggccagccttcctccgccctcccttcccttcctcctttgttctctttccctgcccttccgccttcccttcagttcggtctcctccacccgcccttcgtcccctcagtcgccccccatccctgggctctgctgtctggcgtctttcccgggcacagaacgcgcctccagctacattttggagactacaaggcgccggacacaaccacgccctttacaggggcccaggctcgcccggggcgcccctcgccgtgctcgcgaccccctccccaggcccccaccctaggccttagtatgggccgcgtcccggggtcccaggcacctggcggcgggcgcggcgcgtcccctccgcgcggcggatcgcatggccgagcgctggcccagagcgcaggaccttgccctgcgcactccgcgcccgggcgccgctagtgccaaggcttccgccctctcagctgcgggatctgggccgggcgcccgcccctccttcatccgcgtcatctcctggctctcgggacctccgggacctgcgcgtggaaacaggttttcccaggtcgtcacacgggaaggcctgggctaaggagctgattaaacccagttacgattgaccgggcgcggtggctcccgcctggaatcccagcagtttgggaggccaagacgagtgggtcacctgaggtcaggagttcgagaccagcctggccaacctggtgaaaccccgtctctactaaaaatacaaaaattagctgggtgtggtagttcacgtctgtagtcccagctattcgggaggctgaagcaggagagttgcttgaacccgggaggtggaggttgcagtgagctgagatcgcgccactgcaactccagcctgggcgacagagtgacactccgtctcaaaaaataaataaataaaaataaaaaataaacccagttaggcttgagcacagggagccccttttctttttgtcaggaagggtcttaggacctacccagagcaatcaagttgcgatttcagtttctcaaagcttggtgtttgaaatgtctgttccggatgctggacttgtactctaagtctgggacggggaatgctagatgggccctttttttttgcttttattactattattattattattttgagatagggactcactctgtcgcccaggctggagtgcagtggtgcgatctcggctcagtgcaacctccgtctcctgggttcaagcgattctcctgcctc

SEQ ID NO: 70463 - DNA, 1575 bp, Homo sapiens
agattgatttaaaattgtacatggagagaaaaccaaaatgagcattttaataccctcagcattgctttctgacctacaatgacatgctgccaatggtcagaaaacggaataaaagcaaaatactgtacaaatgtaatgagaaaaccccaaaccaccacaaactaggggaagatggtttttgcagcaatcctgcccagcagtggtttatctctgggtgtggagatttaggaaaagtgctctttttctaatttttcttttcttttcctttttttttttttttttttttttttgagatagggtctggctgtttcacccaggctggagagcaatggtgcgaccatagttcactgcagcctcaaattcttgggctcaagcgatcctcctacctcagcctcccaagtagctgaaactacaggcacatgccactatgcctggctattgatttttttttttttaagtagaggtggggtttcctcttttgctcaggctggtctcaaactcctgggctcaagcaatccacccgcctcgacctcccaaagtgctgggattacagacgtgagccaccgtgcccgacctaatttttctttctcccgcaatgttatgtatttataagtaaaaatatgaatattttttcttggagaaaaacgttaaataaataaagagatggtgataacagccttgaatgagtttaattttggaaactgtgacattgaggtgacccagagcatggggcctgcccaaggcctctcctgcagattagaaaacagatcccccttctccaggaaagagctgcattcctaggcctgtaagtcacgggtacgtttctgctttatcaaaacaaactgggcaattattcagagacagaaaagggaacggggagctctttgttcaccacgctattcatgcctggtcacggagcccaaatccagcacaaatgaacattcacaggactcacctctgctcctgggctccttcctgaatccccgatcaagaagaggaaggttctctcccaaaggaagcaagcgtgaaggcagagagcacttgcacaaggctttgagctgggaatgattaacttcgagtttgtttttcccaagtcagaagatcagagagagttaggacagacagagcagactccccccacatcgcagcatgggggaatctcaaagccacgcccacgtctaccaaaccagtggtcagtttccttaggtttttattttgttttattttttgtagagacggggttttgccatgtggcctaggctggtctcaaagtcctgagctccagtgatctgccctccttggcctcccgaagtgctgggattacagatgtgagtcaccgtattctgccagtgtccttaggtttttaagtgattgcctgtgctgttacacagggtgctggctataatatgatcatatccaacctggcatggtggctcatgcctgtaatcccagcgctttgggaggacgaggcaggaagattgcttgaggccaggagtttcagagcagcctgggcagcaaagtgagatgctgtctcttcaaaaataaaaaatattaggctgggcagtgtggcttatg

SEQ ID NO: 70464 - DNA, 609 bp, Homo sapiens
gtctagacctctggagagagaaactcagacacgtgaaagggtagaaagactcagtggtgacacacagtgtagtccctctcacagccagcacacttcaatccaccctactaaaacccaggccacagtttagttcctcattttaaaataaaagtgggagacatagcatgtaaggatgaggaaaggcggagagagcgacccccatttgggcaccccttttggttctctggttcctctacttgcaagtatttgtgtaagcgggaaaagcttgagggcatgccaggtcaaacaagaagcttcctgttacatattatgtctgtgcttgttcacactttaaactgctgcacacattacaccagagaaaattccagcccaaaggtcaacctgcaaccaatcagttcctaagtcctctattttgctattttcttttctgcctactttaaatcttctgtttactttttgttcttttcttttcttttctttttctttttttttttttttgagacagagtcttgctctgtcacccaggctggagtgcaatggcgctatctactgcagcctctgccttccaggttcaagcgattctcctgcctcagcctccccagtagctgg

SEQ ID NO: 70465 - DNA, 728 bp, Homo sapiens
tacacaggcggctccggcgacagcgcctcagggctggggcagagcgcgggcgccccgtcgggggtctcctccgccaccttgcgggagtcgctctccgccgcggccgcctgggccagcccgggcgcctccatggggacgcactcaggtccggggcaccgggccaggccggagcgctcggggagccgggcttcccgggacgcagcctcggagggcggcgcggcggcggcatcaacagaggctccccatgcgcgctctcgcctcctggtgcgcggtccggcgcggctgacggagcgacggggacaatggctgggcggcgctcacggcacaagcagcaacggccccgagtgggagcagccgccggcctcggggggcgggcaccgagtgcgggacgactgcggggaaggcgggggccgcggcccgggctggggggggcgaggcgggggccctgcgcattccgggtctcgcgcccgccgcctcctccagctcggtagccgcgtgcgcgctgttggggcgggcggaagccgcctgggcgtgaccgcgcctctccccgccctaacccggccgcggggctgggggcgtcgccttcgcgcgcgctccgcccccgccccgacccagcccaggagccggagacccgggcgtgcggcgctggggaggtgcccacgccccctccgcgcccggggcacccctggggtgggacccaggctgacttctcctcggggacgcactgg

SEQ ID NO: 70466 - DNA, 2982 bp, Homo sapiens
caggagaatcgcttgaacccgggaggcagaggttgcagtgagccgagattgtgccactgcactccagcctgggtgatagagggagactccgtctcaaaaaaaaaaaaaaagaaaaaaaaaatcaaaaactttgtagagacagtcttgctatgttgcccaggctggtctcgaactcttggcctcaatgtatcctctcgcctgggcctcccaaagtgctgggattacagcacttggctccagcttgacctttgttggtagaactactcagaaaatatgaccgatttagaaattgggtggtgccaagtaaaccccacccaaacctatccccgcaccagttctcatctacctttttcgcgtgttggggaactagcaaggcaggggctgccgctcgcgggggcttggcctccctcacgcagctcagcctctgagcgcaaggcacagggctctcgcgctacggccgccacccgccccgaggccccggtcccctcccctcaccgccgcaccaggacagcgcggccaagagccgggcctttcgggggctggtgcggacgtggccagagatgcccgaggagaagcaagagaccatgggtatgcggcggtcacgggcctctccggcccgggagacggacgttatggctggcagcgtctcgataccaaatgtttccagaccatatgcttgccgcttcccgcacttggaaagaccaatcgttaggcccgaggatgcaagacccacccactttgcgatggaggcagccaatccagttgctcgttacttccagtgtcgcaggcgcccttacgaaagatcctgtccaatcgctaccgggaacgtcctcctagtcccgcctcagggccatcgcagaggctgtcaatgccgtctgacccctttaccccattggcgtacttccttccgacaccatgacatgcacagcaccaggccggggcgggtcaatggcggtggcggaaacggcgggccactgcgcgggaacgggttacgcggctgacgtccgccgcagcagccgctgggtcctggaggcagaagcctccctgagaagcgcacaataggcagggcgcggtggctcacgcctgtaatcccagcactttgggaggctcaggcgggcggatcacaaggtcaggagatcgagaccatcctggctaacacggtgaaaccccgtctctactaaaactacaaaaaattagccgggcatggtggcgggcgcctatggtcccagctactcgggaggttgaggcaggagaatggcatgaacccgggaggcagagcttgcagtgagccgagatcgcgccactgcactccagcctgggcgacagagcaagactccgtctccaaaaaaaaagagagaagcgcacaatggaccaagggctcttgccggagaggcgccgccgccgaacccgcagccagacgcccctcagtagcgcccgcagcgggtgccgcggctctcgcctaaaccatgggcgcacccgaggggcgggctcgcctcccgtcggccctcacagctcggctgggctcggagtccgctccgccgtcgccttcccgctggggccgggaaacgcagccgcggagccgcacagcccttgcagccggatgagaggccccgctggcctcaggacggtggtcggggcggcgggcgggggcattcgtgcagccttgtggcctgcaggcgctccccgtcggcaaagctgcgccgcaggcctcggggcgggcctaggggccaatagggggctccggggtgggcctggaggcctgaggccaccgggggtccccgggcaggtgatgggggcttgcggagcgggggcgccgacctctgacccacgagaggggcgccttcgcggtgctggtcgtagttattctcagcgtccctattatccgatttgaaatgagagcaggcggctctcgggctccgagccggagggggcgggcgaactgggagcaatgtgtacattccacgcctagaaccctgccgctgggcaaatggaggcccgtgtccctgcggtcgctgcctgggagggcgcacgaggtcccccaggcgaggtgacccacaggaggttttgtgacattgggcggcccagtcctgggggtggtgtgtgctagtggtggagggcggcctcctagaggagccgtcagccttccagggaaggcacctggccggtcggggagactccccggggctgcgggggaagctccacctcctcgagcgccccccggggagacccaggacgcaggggtagccctgcgcggagttcttggtggctccaggtgacgctgtcataggacaaagggccccgggtgccgacctcctgtggagggccctgccccgctgcggctgaggaggtcggcacccggggccctttgtcctatgacagcgtcacctggagccaccaagaactggaagaggcaggaaggaacaccccctagagcctccagggggagtccagccctgcccacaacttgatctcagattcctggtttccaatactggaaagaataaacttctgttactttcagccacccaaattgtggttatttgcttcagcatccataggaatttaaaaactaagaggtatgaattttatgttgctgccaaaaggctttttctaggacaagtagatatttaacctagatagttgtagccttttctcgtcttcattgggatcagaactcagttgatggcctctgtcctcctatctcaatgttgattttactttctctttaatcctgttctaaagcagtgacccttttaatattgcttaagtaaatatcaatgtttttctggtcagtgtgagaccagaaacctttttactttgggtctgagaaggagaagtattttccctccttctcctctttttagagatggggtctctccgctgcccaggctacagtgcagtggcataatcctagctcactgcatcctcaaactcctgggctcaagtgatcttccggcctcagcttgctgaaaagctgaaacc

SEQ ID NO: 70467 - DNA, 888 bp, Homo sapiens
gacacaagtattataatttgtacccaaaacttcctcttctaaaccaacggacagaagggagaagaggatgtaagatacatgtaaggcagaaaggaaatgtaattaaaaatcgagtatccaggaaagtcaaattatggagagggacaaggtttggggctacaaaggaaaaaaataaatagggagcaggtgatgttgactatggaatctttaaagataaaggttctatttgggtaggtgaagtagtgaaaggtggtaagagaggagaaaggaaaaaaacagtcaggcaggcagttagcgtgggtcctccgttgaatcctttgaaacaaaggaacagcctgcaggcagagataagggaagttacacagtggggcttgcccaagacatgcccgcagccacacagataagaaaggctacacaggtgacttgcccagacatgcaagcaatggaaatttccatctcctgacacatgcccagtaaatggaacaaaacaatacggactaactcaagctaaggggccgtgtgtgcattaggaggatggggtagagctactagatatgtgtgccttatgcaaatgagaggcccagacctcactggtttcttataaaagcctttgcattcaattgtaaaaacagcaaccctcttccaggtcccctctccgcagcagagagctttcttctttcacttattaaactttcactccaacttcatcctttctgtccatgctccttgattctcttagtcatgagacacagaactctgggtgatacctcacaatgagagactgctacaatgtggtgcactggcgagactgcaacagtgtcattcctgataaaaacaaaacattgagtaaagaaatggaggagggtcttggcaagacttggactgccc

SEQ ID NO: 70468 - DNA, 486 bp, Homo sapiens
tgtccttctgaggccccatgactatgtagtcccaaactattctcgccgatcacaaaggaacattctgtttagggctacttttacctttgcttagaccatccctttattcaattaatgtttgaaacatcatacagtgggggaaacagccatgctatggagtgcgcaatgtttgttaaaaattaaacaaccactcacccctccttgccccagtgaccttttcttatctaatctttttcttggcaccggtaaagagaacagcctttcttcacataatcgctccatggcttctcagcagaacataaccaaccgccttgctgaggtggcctagggtgaccgggtcttcctatcttttgtgcagagctcttgtcatgcgcaggagtttggggagatgccccccacccccccgcaaaaggtttcctatggctttaaaataagaggtagttcaggaacattaactgttcactttacatttaagatatgatctcc

SEQ ID NO: 70469 - DNA, 1011 bp, Homo sapiens
atcgctaccaaaaaattaaaaaattagccaagcatggtggcgcatgcctgtattcccagctactctggaagctaaggcaggagaatggcttgaacccaggaggtagaggttgcagtgagtcaagatcgtgccactgcattccagactgggccacagagtgagactccgtctcaaaaaaaaaaaagaaaaaaagagagaaggtgacataataagcttatgcaacagaagggccatttgaaatatgtccatgtgagtaagtaaaaccctcagtgttcaaatgattgaggggaaacctaggaagacaggccagttggcttgggttttccagcacaagacccttgcaaagttaactattctaaaaggtcaaaagtaagtacagcctctgatgtaaacagccatgggtgatctcagcccaaaacaaacagcaatgggatacatgacacccctggcacctgaaaccctcttcttcctcctctcatgtggccgctttgctaacagctgtcaggagatacctttccccgacatttgccggactcttacacttcatgtccgctaacgagaattccatttgatcaagatggaatttgaaaacggaacctgaagtttcaaaagctgatagaatagtcagctggaggtggtcgatgatggaaacgtgccaggaaaactcaacagaacaggagtggagcagaagtgagtggtttacaggaaaacagcctgtaataccaggcattgtttgcacacaaaatttaaagaaagccccagacacaggacaaagagaagacatcaaacatgagtcctgagaagaaaccccctggtgctaggcccagatggcaactgcaccacacacacagcctgcacgtgggaaatgattcggggtcatgccacagcatctggaagtttgggttttgttggtttggtttttttcccctagaaacagtagaattataaagcagaacaactactgtgtcctgaagcacctattaaaaatgtcccaaaaggtttatttatttt

SEQ ID NO: 70470 - DNA, 1839 bp, Homo sapiens
caaaatgcatggactattctattcaattttactcagttgaacagtttttggagaacctactgaaaccactctcaaggaagggtcccactgacccaggagaagaaggcttcacagagtaggaaagtagctgaagatttcagagaaaaacactttcactacagagaagaatccccccacccccacccccgctgcctggaagatcacaaatgaactgtaaccttccaaagtcaacacacaacatttcataactatgacgtacttggggagctgttcaattgcatggaataattcatatattgaagaatgtggagaacaaacaaatgaatctctgacaaataacactattccaggtagcagtctttaaatatgccctcccaccaacttcaaattttataaatgaatgaatcaatgatatccagtgcttggcagatgggacatgctccgtcgctatcagctattattatgataatggtgatccattctgtagacgttacaaaaaattcactatgaagtttaaaattactcaagctcgtgttgggactgggactagcaccttatattctagtgactatgccactaaatatctcaattactagccaggatattgataaactgcaaattaatggcatttgtttcttcctgtttttttgtgagattcatcagaaatgcatatttatattagaagctgggctttaatcaatagctatcagcaattcaagcatgttagacatatttttaggaaattaacacctacataaagtactgtcttgggcaggcagaagacagaaagcagagcagacagctctccagcctccctggagttcatggtctccaaggcaggaaacatgcactggggaatccctgctaatacaggcccactgtggggagccctgtttgaggcacacagtcctctggagcagggacagcagtccattcaccaggatttggaaggtggatttgaaggagtgggtttagggaagatgactcagggatttctggtcagaggcaggtcatgaaagacaggcataatcgcacatgatgtatgtagccactgggaaatggaaggtgtgtgtggggtgagaaatgcaggcagagggaagagcttagcagagacagctactggctgcactccagtgtggagaggcttgtcaggatgagatggacatgcagaaaaataaacattgtactgggggcaggcagaagacaaggccccaaaaggaaaccagaagtaatgagtgaggtagggagcaaggggtcaggctgagaggtctgtgctttacgaggtgggtggggagggaagctggggagggtgagatgaggtcagagcagggcaactgggcatatcagtgttttagaaacatcaaagaagcaaaaccactgatttaccaagaaactctgaccattgttaaaggcagtgcccccctaccctagcagtattgtttatgtctagtaagattattcgagagcatgactgcttaatttttttttttttttttttttttggaaatccaaaatacaactcatccactgaaatacctggcttagtgtcaaatgttttattctgcaatggtggcttaattcagatgggttggttacatgctacctgctattaagatggcctcatgcaaactgtcattctttgaaactgctggtatgtggagattgcacaacttcatgtacaaatgcacatggaaccagagaaaccacttagcagttacactggtacaacaacaccatacaaatgaattacaaagcagccctcaagagatgttacacacgtgataacaagtagtcactgctggcctgtcattttagcaatttatagtttgcttgatatat

SEQ ID NO: 70471 - DNA, 1387 bp, Homo sapiens
ccctgtgaaattgaattcatataaatccctaatagacaaaaaggatgtatataaagatcaaatcaatttgatataccaacatgcttaaaatctccttattaaattgcgcttacaataggctgtgcatggtacaaagaaaactcagtaaaataagactcatacaacccagacagtatctgcattgggaatttcgtactattttctaaaatgtgggacattcaggaaatgtccacttccccctagctagctggtaagtgaccctttgatcatatgcctcacatctcatctcagtcttacagggacaggcagtttcaacaccagaagctcctgtgttgtcacaatgaagaggctggaggctaccatgtaagcgacccactagccccgacttcaccccaaccaggccagacacaatcagacacaatcttgtgctccccgccatgtgacaaaggttactaccactggcaaattctgagttcagtgtgcaaatgtgctatcagtttcagaatctgctctttgccctgaaaatcaagtaaaatgcattcttttgtattatgtaacagatgagaaggagatgactttgcagagttttacgttgatatgagaaagaagtggcactgaacacttccaaagggtcaatggtgactccatgaaaaagactttatgatcgtcaggagcctcctgtcctcacagaagctataccagcattctttctggagattatatgatctctgtagccagctgtcaatggtaaataaaaaagaaagggaaagataccgaggaacagtattttgttctgatcaggacacacttagttcaccacttgactgtggtaactcaggtctcctaggtttcactagaatgtggaaagctctggaaactcaaagggaaggcacatttaactggactttttattcgttctttttaagacagagtctcactctgtcaccaggctggagtgcagaggcatgatctcagctcactgcaatctctgcctccctagttcaagcaattctcctgcctcagcctctcaagtagctggaactacaggcgcccgccaccatgcccagctaattttttttgtatttttatacagacagggtttcaccatgttggccaggctggtctcgaactcctgacctcaagtgatccacctgccttggcctcccaaaatgctgggattacaggtgtgagccaccgcgcccggccttaaatggactttttctttcattggctttcttaagatctggagaacctgaccaactatctcaaaatactgaccatcctcagaaaaatatttgattttgtgtcttctttgatttgccagaaagctgcttacagtactaatttcatttactttgaatcacttttcgggttgctacttctaagg

SEQ ID NO: 70472 - DNA, 645 bp, Homo sapiens
gaaggtatgaagaggagcggtagtcagagcccaggaatggcggccactctaggagctggagaggcaaggaaacagccaataccccacagcctccagaaaggaacacagccctgccaataccttgattttaccaactgagaccaattctggtgtccagaactgtaagacaatacatttgtgttgttttaagccactgtttgtgacaactggttacagcagtaataaaaggctaacatagcaactctttgggcagtttctttaaaagttaactataaatttaccatacaatcctcaggaaggaatcagtccagtcctacatgtttactcaagaaagaaaagcctatgtttacacaaagacttaggcacagatatttatggcagtttcatttgtaacagctaaaaactggaaagaagccaagactgtcaataggtcaatggatattcagcctgtggtgcagccacacaactgaataaaaggcataaaaactactggtacacacaatgacatgagttcccaaaattatgctcaatgagagaagccagattaaaaaaagaacatatactgtgtggttctatatacaattctaggaaatctttaatttcagaagcagaccagtggttcctttggcatggggtcagagagag

SEQ ID NO: 70473 - DNA, 581 bp, Homo sapiens
cctgaacatctcaatctctcctccagagccctcatagatccaacttaggcttttcttaaattccttttgaacttaaagctctctcctcaaattctccacaacagaaagtgccacctgccttccgccatctgaatggagccacctaaatgctgggaatgttaagccatttattgtaaccacctctactgcttggctacctgtattgctcaatgacttgaagtgggcaactttacaggcttttatcaggttgctgtcagagaagcaaggtcagcacaactggtttaacaagatgagggctgagataaggctagagcttccagaaaggaacaagtcatggagccacacccaggaataactcacatatttgcattaagaatgcagaagcaatgcccaggagagggcagcactgacaacgcacacaaagtctaaggtcattgtgatccacatgaacaaggcttctcttagaaagtacttaagggccagtttatgaccaaattcctttgacaaaggaatctaggaaaatacactaggagaaaaacctccaaaaacatcctggtgaaggctatgctctcaccaaagcc

SEQ ID NO: 70474 - DNA, 1549 bp, Homo sapiens
cctcctggtgattatgtgtcatagtgttaactgtgtcaaggctttcggtagagctcagcatagttctgtcttgagttaaaaacagggttttattctttgaattctacttgaattcctcttggctggtgaagttcacatgtgctaagactgactaccttagtacactgccaagggtttcttaatgcctcggattgatagagcagctgttctcaaacgttcacgcgcttaaaatgcagattctgattgggcaggggtagggtggggccccagcttctacatttacaagtagcccacaggtgatgtccccggtgctggtcaccctaggcagccaggccacttgacggaccttctgtgcctctacactgttgacggcgcgggataattccttatggttgcatagggcactcctgtgcactgcgggaagtttaacagtatcactggtctggactccactagatgccagtgaccccatcactcctcgccagctgtgacagccaaaatgtctcctgacatcgccattgccagatgccctcagggctgcaaaaccgccaggtagagaaccgctaccatgcaggatgctaccatcaaagtgcgcccacagcagcaaccttggagcaggcaggcaagtatcctccaggctactttgcagacggggaagctgaggctgggcaccgctcaaggtcgcacgcatgcgtaaccgaaaagagagcgcggaggtcccgccgcgcctcgctctgaggagaggacgcggagccgcgcgcccgcccggtggaccccagggactgctcccacgtgctccggccccacgcgcgggccgccgaccggaagcgggtgctggggccgcgtagacgccgcggccacgcgcgcccgccagcccggacatgggcccgcgggcgctcctggccgccgcccgacttcggggccagccgggggcagagcgcgcgggagcccgagcgtccctgcatgaacaccgccccgccgcggcccccaggccgtgacgtaccccgcgccgaccgtccccacgcccacacaagaccgcccttactggaggcggcggctgcacactacccacccagaagaagtccgtccatgtcaaagatgaggtgggtgacgggctgcgggggcgccgccatggtggcgccttctgggtctgggtgggggcgaggaggaagtgcgcgcgcacccgcccgccccgcgcacgcgcactgaggaccttctcgcgcgcccggggtcgctctgcgcacgcgccttccgcggcccctcgcccggctccgagcccgcgcgtcctgggctgcctagtggcgctccgcgcacgcgcaccttgggctttcgccgcagctgtagctgcagacccgggatgcggcgcgggccggcgctgtatgtttacccgcatcaattcctcctcacttcacacccggaatcgggccaagctactcagccagcggccgcgcagagccgaggccctcgtctggggacaaattcagtgcttgagtttggatcaggggtgtgaatgaggaaggagggacagtacaaggggctgtagagtggg

SEQ ID NO: 70475 - DNA, 1078 bp, Homo sapiens
accagtgagagaagaacaaaccttctgctccttttcgccttcctttcctgctactctccaggtggagggatcagtaaccacagcagggggaatgagggaggatgacaattgagaaagccagaagcttccccgtgtgtgccctctgtttcaggaccatgaaaagcatgccttagctgggggtagggtggggagaaagggaagtcttactctggaattaaagctgcagagatttagcctttcattcgacatttaactttgatcttgaaagcattcagtgaccagaaacatcatgtgatgtgctggaattttgaccactagctggtataagacatttctgcaatgagtaagttttacagagaccctgggagacaaaacatggccttttggtaaaatccgagtcgtatttattcatgttaaaatacttttcaggtttcagcatgcccaaatccttagttattattaagactagaaaatgggctaacactgctactttatatattatttgagtgcctactgagagccagaggcacacaaaataattagaaataagcaattttttatttatagaagcaaagactcagattaggcttttttttttctttctccctttcctttttccctaaatgctgtaaaaacaaacaacacgaggaaactaataaaagagaaacactggaggttatttttcctggggtgtgattttcccccaaggtgtgtggtcagaagactgcctgctgtttcatcagcgttgatgggacacctccctgctgagtggtagccctgctcattgcccaaccctgtggtattgacacagagaatgaattccttggggctcttggcactgtgttgtatgtgtaactcacgtaacaaacaggctggcaaggcttaggcacatcaggctctccacagatcattaaaaacaaaacccttgctcttctcatcctaaaaccacgtcctatgttgttcatcgaaaaaataatcatcactgtttgtctgtcccaccccaccattatatagcctccctcttcttcctcaacacatgctccctttccttgctgcgcaccatgcaatgcaaaattca

SEQ ID NO: 70476 - DNA, 1053 bp, Homo sapiens
tgtgaaacataatgcatgttatttattttagagtctaaatgttatcttcctttaggagtaaattctcacctgaggtaaattgaagttacttctagataggatggatgctttaaagggttgtttttaagctttgtcagggcattgctagagtaaccattagcctaggtttagtttaaccttaatactaagacgtggtcctaccgcagccgataataaggccctagttcttaattctatactctgaacaatttaaacttccacaccttattaccctgtgtacgctctggaaattgttccgcttacagatccctggagatttctgcccagactgatagagtttcatcaactatatgtatgtccttatttgtagaaaacacttaaaagaacctctatacagatttttagaggtctttcttcatgaagttttatgctttctagaactctgtcctgcaactcttgccacctcagcttccctgaactttgatctctgttttatcaactcagtgattgccttcctctgtttttaaagcctcgaatgtttgtccaggtgcaaagggcaattgtcagactcatacacataagagatcccatttctgtcttgatcgttgtacaacatctgaaagcaattgtttcatatattttgtctagtggtctgtttattgcttatccctttttttttgtctaaagcataaatcccactaatcctcacatgtttcttatataaacatatcctcagtatcagcattgatgtctctgagaatcttctcatttttcctatcttatttaaagtagccaccatgcaaattactctctaactctttgtctcattcaaattttcttataaaatttcacaaaatataaaaaacatatttcttacttattggttcaactctttattacattccttccccttaaggcactttgctttgcacatagtaggtgctctaaaaatgtgggaattataataagtacttaatgcttgatttgtggaatgggcattctaccaattaaatttgtaaacctaatcttatatattctttagtataagatcac

SEQ ID NO: 70477 - DNA, 2308 bp, Homo sapiens
tttcttctaacatcattctctgttttaagcacagtggtttcaattaattctaattaaacacaagaatctttcaaggaaaccctttctttccctcctcaccttgacccaagtcttatacattaaaacaaaacaaaacaaaaacattccacatttattcggtacatagattatgaatctacgatttaattacttggcaggaaacagacgtataaattccagttgacaagggcatttggtcttttctcttgaccctttgaaacgttttgcgggtgggggcggcactaccattatgaaacagaaaattattagagaccgtatcaaattccaaatgaacaatacatttgttcttggtaagtgtatcagaagatttcaaatacagttccctactccccttcccaatttctattgtgagcacccatgcttttatgaacgccaatacaattactcagtaacgcaataagcaatcactcaacaatgcaatacatttctttgccaagtatctcaacacaaactgaggtcatgcctggtgaaggcaatttaaggctctatgaaatgtcagccacgccactttatacttggaacacatctaaatacaaaattacatgttttcctatgcctcagtgcgcacaatttgcccaagtgaatgaaattgtgcctccacaaggctgtccattctgaaggtctcagggtttccttgggggcccaagggccccattcagggaccccaagatgaggcacattacagggcctcgaatttagggacctaagaccgcctgttcctgatgcacccggccaggccctgtgagggcaggtggctcggccgccgcaggctgcgctggcgtccgcgtaggctgagtcccagtcatcgatccggggtcaagccccagttttgattccacttctgcaaatggggacgggaagggggttgggtgtgtagcaaccaggcggccaggcccagccagcacaggctcagtgccctcccgcggcttggaggccggcagggccggggtggtccccgcatcagtcccgcaggagcacacccttgctgggccccagggctccgtaccaatgcagccccgggacacttccgtgttgaacgagtccctttaaccagatggcggggccgggccgtcactcaacgccattccgccaccaaggccgcgctacgctctccgcgagccggcccaggaaagtcctgcggcaggggttggtaccgcctcccgcgcaggtatgtgacgtcatcgcgccgacgaaggcgcccgctaggccccgcctgctctatttaaacttctggactcaacctggccgctagaccggagcgtcctccagcgcaggcaaggattcctcgtttagagtcatgttatcttcgagtacctagagagacattttaacccacaccctagagaggcgttgtaatccttacgtgtcttttaacgctacttggcccttacctgcgagcaactgacctttaataatcctcattttctgtgccccggaagtgccttaccctcttcgcgtctgtttcccggaagtggttcttctccctctccaccctttcgcccgcctgggcggtccagctgcccctaggggccaactccagcggctattttggggctggacatcccgcagcttttcaaggcgtgcctttggtttttttaagaagtgctatctaaaggaaaagctggactatgactctggggaactttcatatcctcagttgaccttaggctgtgtgaccttgagcaggtagcataacctctctgagtttcccgcgtgccttatgtgcagattgagatgctaaaatgagagagctaaattggaaagctttttccacatagggggccgtgagcaggtggctgttttgtcctctggcacctttggctcagacttaagcagcttcaacgaccgccaagatgcctgccatgcccaccaagatttaaaggactctgataattctttctctccccaaacggtgttttccttatctaatcctaataaccaagcctggaggaatccctgacttcgtgattgaaggctctccaggtcccctagtttaagggcagagatttactttctctgaggctacaaaggagcgtctgcgagaatgtctctaccttagacaaaacagggaggaggggtggagctctccaaattgcctctggtttgggctttttctttctgttttggtgtatcgtctctggccaacaacacctgtgagtccttgatgtgacgattagggaagatgtttttaattcacataactattctttagagaaaattgatcctgaaacaccttattgccttatcg

SEQ ID NO: 70478 - DNA, 2128 bp, Homo sapiens
ttaatacattaacttgtggcctgcagctgatagaaaagaaattaacactgactctttttgactgtggaatgaattggattttccagggcaagaaaattaattataaatgctctctatttaagattgccagattttttatgataaatgatgtaattatgagatgtcaagtatacaaatagtcatgcatcgacatttcagcttattaattccaacattcaccattgcgtatgacatattcttcacatttaattgctcagtagaggggaggcaaaatcattgttctcctcattttccttgtgattttcaggcagtacatttcagaagacgttgaatgctaatgcattaaatttctgatgacagcctcatgttgcattttgagctaagaccaaaataaataaaattcaggataaagtaggataaggcaacagaaggaggaacaaagctttacaaaatggcaagttgggtgaagtttgtcttcagctccctctcatctctctgtttcccttcctctcttctacccattctggggtgtgtgaatgagtccttggtgccttgatggcgaattctagggtctcaggagcttccacctttcccggaaatgctctccttctctcattgatcagtgtccctgttcattctgttacagcatgaatacaattgaacagcatcggaagaattcagggccactcccctgtggccacagttatgagtcacagttgataaggtacataatcttaaaaatcctgcagtacctttaaaaataagtttgtattttgttcatcccacctgtgatgttcagttttacaagtcaatgcagttaggctacagttcccagttatccaatcaaacaccaatctaggtgttgctattttggtatagcaaaaggtgttttgtagttgtggttaaagtctgtaatcagctgactttaagtaagggaggtgatcctggactatttgcatggaccagtataatcacaggggtcctcattagagggaggcaagtgggtcagagtcagaaaaagaagacataatgatgggggcggagattgaagtgatgccctttgtgaaaataaattcatcaaattgaagctgttggaatgttaaattattttgaggcttgaaggaatgtgattgtgagatctgagtcatgcagccagcagctgtaacctttgcttcaccgatgataaattaaccctcttcctaagttttccttgttttgtaaaatgttgtgaaagagtaaatggcaccagagagaagaccccttcactcttaattactaaccttttattatagattaactgccttctttcttttcttgcacacaactcagaccagatggtgcaaaatatcccgtggctatcaaattgcttaagacagaatttttttaaattaaaaaattattttttttagagacagagtctcattctgtagctcagtgcaggggtgtgatcacagctcactgcaaccttgaactcctaggctcaagtaatcctacttcagcctctcgagtagctgggactacaggcacaagccaccatgtctggcttaatgtggactattaaatatgcctttccttaaaaggaataagctgtaacaaatcaaaattactgcaactcataacccagtcttatgtgaaagtgttgtaatcatggtaaacttctttgtatttatctaaatgagtgtgaaaccctgacctctccacctctgagcactgactccactcctttggagtttgtatttcccaagaggacaaattcgaactttgctcttgaataaactctttaaatttggattctgatccctttgtttatttcaggttaacacctttgatggtggaggaaggagctgccgggcaaggaacatgggtagtccctagtggttggaaagacatggaaaagcagattcttacctggagcctccaggaagaaccagccctgccaaagttaggtttcaactcattgagacccatttcagacttcttacccccagaattgtagagtgagaaatttgagttgttttgagccactaagtgtgtggtaatttgttactgcagcaatagaaaactcatataccataagatacctctgaaaattatgcaagtgtgtaaaatctactatttattcaatcta

SEQ ID NO: 70479 - DNA, 2016 bp, Homo sapiens
atgtgcagagatcacacaaaaacagaggaagcgagagagagagagagagagagagagagagagagaggagagaagtgccaggctgtttgtaacaatcagttcccatgggaactaatagaatgagaagtcatccacccccaaccactgagggcactaatctattcatgagggatctatcctatgacccaaacaactcccaataggcttcaacagcaacattggatcaaatctcaacatatggtttgggggacaaatatctaaactatagtactggagatgaaaaacagatttattttccaagtgaagcctggcccctatactgtcttttaaaattctacttggaaagtatctggttccttctctaccttgactcttctatcatactcagttaaaatgaaccaacagacactttcaacaatctttttgctttgcaggaaaggaggtatttcaatgacttggggctatcacatcattagtatttttaatgagcagacacataagtagagtatttcagtaaagtgttaaaaaataaacaatgtatgctcctgtgaaggggatggctactgtacctccagtgctgatcacacaggcttttctgaagcatagtctgagcaaagaccataatggtgacttgagtgcagccatatgaaaccagcagggccagcaccccatgtgatgggagcagtaagtgcaaaggccttgtgatgggaacacactgctgtgctgagcagcagaataagggctggcgggtcagagtgcagaggccagagaggagagctgtgaaaaaaatggactgttgcccattaactttgtaaactctggaaaacaggatattaggttgcatttgcaaggctgcatgtaagttaggtacttcttaaatggttttggtgtgttatgttcaccaaaataatactaatactggggatgactcatactaaacaaggctgagttatgctgaccctagatcaaaattatgaggtgagtaaagtttgtgttgacaatgcctctcctgcactttctgctccccatttccccgtgcgtcataccttgcaagatactcctgcatttcctgttgtgcttctcacgtccgccagccctatacagatagtggcatcccccaaagattaatccactcctatccaacacactcagctgtgaatcactactgtctgtggtggtcagaaacaccatagacatgtgagttcatgcaacaatcttccctttctgttccccatcagacatttgttctttgaaagagaactccaggatggaaaatgtctcagctatatgatagatttaaactttatagcatcaatggagattgtccccgctgcccccattttccacctccaacccctgctatggttagatatcctaactgagcatatatccatgaggttgttcattagtgctaattaaggaaaggaagagaatggtcgttcagcaaaaggagagttgtttctcagtattattcattatgttcttttggaaattgcatgagatggtgactaacctatgtgttgtctctaatttttctctgcttcctacactagatgtcactgtgcagctcattattaatataagtagcctaaggaaactcttcatagagaaatggaaactttttaaaattttttaaatcacaaaggatccctaacatggtagcacctgaaatgcaagcgatctgctcagctggctgccattcggcatggagacagctcatttcctctacatgaattaccattagtctaccccagtgtaacgctaagaagacttatcaacaacttgaaatatgtttttatgtctttttcccatttgcatacctgtcaacctgatacaaagtgagaatttgggaaatgcaaatagcctactcatgaaatttaatgatgtgcacatatgctctattttgatacattgtaaaaatacaccattccctggatgcttaaaaaataatgtcctcccctgaagataatgaagcttggaatagagtaaggacccccacctcacctactttgcctt

SEQ ID NO: 70480 - DNA, 1554 bp, Homo sapiens
atcccagtgttaatttcagataaaaccaaagtccctctgcttgtctgctgtataagccaggaggtgcacagtggagccacctgtttaagctgtaaactcattttccaggacagaaaggtaggctgctctcagctgtgcacgaagggaccaggaggagggttggggaaatagcatggaagctgtccactcttgagagttggaatattatatcactgccattgtacagaattgccagtgcatgatgataatataaagaagatggactttgagtctgtttcgtcattgtgtttagttctccagagctccttctcatggcgctccagcctgattatgatcttccctcctacgggcactactttagtgcctgcgccctgggggctcactcccactaccgcccagccctacacatcggcagctcccacccaggcatgccacatcattgctacatgatgggtatcactgcacatggtgggaatcactgctggcattttaaagtgaagacattgagtctcacagcagctagacgacttacttgagagttctaggaactggaggtcaagtgttttaagtcaatcacactcagttcaccacaccagatttttctgtattctgataaagtattctggtaatctatgttcttgactgtttcaacagcagagtatttttgtcatgtaaaatagtatccagaatcccaatgttcatttcaattcaaaaccaaagtccctctgttgtatgacttggaggaccccacagaagccttgagaaaaggattttggttggacactggggaatggggctccagagatcatccagggcatgctgagaaaccacagaccaggattctgggcagtcaaaaactccaagaagggattaagatatttggcaacaaaacagaggctgagtctggcaggcaagcatactagccttggctttatttgcaactttgactcatttcaggcctatattgggaaatgattctatttccaaagagagctggactttattctctcagttgagtactcccttcgggccaattccaaactttcttcataaaatgtgcttacatttccctgcctttgaatttctatggccagagttggcctttctatgaaactaggaagggaaaaataattttcaagcccaagttaaattctcgtgtgtttgaccctataactattgtccctggaaattttagcttaaccttaggacattggcaagcccctatgttactaatatacgggtttctccctgggattgtgagggagttctcggaagccagagagagcttgaactctctccaagtcttccctgttgcctcacactgtggccttttttaatctctccatctttgttcctacagtacagacagaattgcttttgctgcccagctgtcggtttctgtggttctctgttgcagctgtccactgcataagttaggaggtgctttggcttgcgcagtggagccagctgtccaagctgtaaactcatttcccaggacagaaaggtagactactctcttcttcaacaagtaggatgcgtttaccagatccagag

SEQ ID NO: 70481 - DNA, 895 bp, Homo sapiens
ctgcattcaagaaggttctagtctgtgaggagacagggatgatgaaagtttagacaaggtgcagacatcggtgggaggtggtgcccaaacttttctggaagagtcggggagggcttcctgtaggaggcagtggttaaactgagacctgaatgacgagagggaattttccaggagccaaggagaatgaagagcatttcattcagaggtaaaaacaatgggtgaaagtccaagggcagaagggaacatgacattttcaggaaattaaatttccaaatcaccatcaaccaaaaatataatcaggggagttacagaaaagaaggccaaagagcaagttggggccagctgacatgcagaagaggcaagatcagccaagtccatgggaaatgctaggtcaaacctaaaggagtttaaagtgtcaaaggtggtggtgagtttccaaaaggaaagatcataagcagcagttctcagatgtcggtgatgatctcggaagtccagggttcagggttctgaaagggatctgggttgggaaacactgctgagagaatgacaagtcattaaagactgattagataaaggaatttcatcatcaggtgtgcatgtgacagatgtcactctgacctgaccagcatggagggactggacaggataggccctgaggcatggaaaacacaagataccctggcaatatcccaggaagggaaaggctaaacccaggcacggccatgggcggtgggcatggaggggctggaatgcctcagagagacactgagacggagaggaacagagacaccacatttccaccttaagcagcaggtgagatggtggaaccatccagagggagaaatcgtaggaagaaactggtttgaggaggaagacaaggatttccagttaagtg

SEQ ID NO: 70482 - DNA, 1571 bp, Homo sapiens
gaaagtcatttctagattagaggggagagcccctaggggctgcttctagattccactccttggggttggaggggccgggtgagcaggctttggggagtgcctgggtgactaccccaaccctgcctcaacggcaccccctccctgtgcaccgacaaataaatggtggctgtaaaaaaaaaaagaaataaatgtttttttaagcagtgcttcctgttatgttcaaggaagactagggccgttttattattaagcaattttctctttttaagtaaacacacacacgaccacattgctgcaaggctaaaatctcttgccttactcaagcatcgacgttttcaatctcctattttctcaagccctcaatgaagccttccaagagcttgcctatgtttaatttgcattccgaaacagaaaatctaatgtgttttaacattgtctgcttcagctgaaaaggaaactgtaaatttatacagtctggtttaaaaaaaaaaaaattggccattgcatctaaatgagtctcctccggaaagaggctgggtggcgcccctccccctcctccctctttcacttcccctcccgcttctccctctttcacttcccctccccctcctccctttttcacttccccttgtcctccctccctcacctcccatccccctccctcctcctcccctccccctctgcttttcaccccctccctcctcctcccctccccctctgctttttaccctccccctgctccttcccacctcccctccccctcccccgctgctttcaccccctccctccttccctccccctctgctttcacccctccctcttcctcccctccccctctgctttttaccctccccctccttctcccctccacctctcccctccccatccttctctgcttttcaccccctccctcctcccccctcctcctccgttttgcacccctctctcctccttctcctccccttccccctcctcctctgcttttcatcccctctctgtccctccctcccccctcctagcctcctctccctgcattggagtttaggccacagcctccctcctccctcttagtcttccagcctcctcccctcccctcccctctcttctcctcccctcccccaggatcagactcggggccggtctgtgccagcgccctacgtggactgggaaagaattaccgaggaccttagaagagctgcgcactcgcagcgccccgcccccacgccgccggccgcccgcgcgggtgtctccctgtgctcccaaaacacggctcaggttcaccgggtcctcccccggggatctcagggctgttggggggtgctgtggttcccagaacgccgcgacactctgaaacaggaaaggggacggcagaggggtcctgctgcgggggagcccttgagaaggcctgggtggagagggacttggggacagaggtaaagaagggagtctctgggggtgaggaagtgcctgggaagggcacgaggaggagttggggaagggaaaatcaggcccaaagttttagggctctgtctctactgaaggtcaaaaagggttcctgcagggcagtggga

SEQ ID NO: 70483 - DNA, 730 bp, Homo sapiens
gggagggcaaatccagccatgctctgcctttgtgttctgttcaggccctcagtggctcagagggtgctcacccgcactgaggagggtgatctgctttacccagttcagcgattcaaatgctaaatctcatctggaaacaccctgaaagacacatccagaaataatgtttaatcagttatgtggacatcctgaggcctagtcaagttgacatgcagaattaaccatcacccccagtgacacccatttgggatttttgacctccagaaccatcagataatacatgtgtgctgttttaaaccactaagtgtgtggcaatttgttacagcagtgacaggaaactaacccagccactaacctctctgagagtcaacttttctcccttgtaaaatgaatatgatcatgacaatatttccccaaccacttcatacgttactatgacaatcagtgacagaatgtttgaaaatgtttcgaaactataaaagctttgccagatcgaaaacaaaatctgctgctccctttgatctagtacttttcctacccactcagctcttcctttgctggccggcttctgcatctcctagggtacatttgatttggccaatctttccaatgacctttaccttttctaaatggggggctgggccccaggcactgaccatttctgctctttagaatccatcatcatcaccaaacagaatgagctttatctaacattttggtattttgttca

SEQ ID NO: 70484 - DNA, 3704 bp, Homo sapiens
ttacgggtaataagggtggtgggattatggggatattgtcaaacagtcaagatgaattctcagctcttttgcattgtcaattacaggagctcagctgtaaatcctggccacactgggctccagtttgaaagtgaggatttccaccactttcccatactttaaaagactggcatctgccaagtaatcaaaacacacaaagaggccttttaaccaagtttagcttggaatttccaactgctaaccacaagcaggtctggcaagctaggaggctggttggctgcgcagctactccagagtgtgcggtagccgagggctgcgtccgcgtaaagcccagagctgtaatgatgtcaacttgttatttactttccaaatctgaatgactgagcaaggcgaaaggagaatcaatcaaccacaatgtgaccctacaggcggaaaaaacgcagcactcccaccagcaggcggtgggggaagggaagcacgtgtagccagggcagggttgcatcatgagctcgttcgggttttctattgcacccttcgtttttctattgcatgtaatacctcagcatcagtctgcacaagcccagggagcccaggagcaacgaagggcaggctcaagggaaggccccaccatgtccttctggggggccttgaatggcaactgatacataataagacacaatctattctgctgattcacaattatggagactgtgtaagtgtgtatttttttattgatgtcctctaatgatggtgtagcaacagtcgttttgcatcattgacgttttacagcaatattttgcagggtaattttgaggtccgccgttttggtggaggaccggcctcttaaaaactcacctccggccgggcacggtggctcacgcctgtaatcccagcactttgggaggccgaggccggcggattgcctgaggtcaggagttcagaccagtctggccaatatggtgaaaccccgtctctactaaaaatacaaaaaaaattagctgggcgtggtggcatgcgcctgtaatcccagctactcgggaggctgaggcaggggaattgcttgaaccagggtggtggaggttgcaatgagccgacagcgcgccactgcactccagcttgggcgacagagcgagactcctcagaaaaacaaaaacaaaaacaaaaaaacaaaaacctcaccttaggtccccctccccctacaaccagaacaacaaatggtctagagttcgaggaagagcaagtgaggttatagtttagattgctgagtgtaccgggctcttagcacgaagctcattatatagtaaaggaaggggcaagaatatttgaaaaatattcaacgaggctgaccccagaggtgctggggagggggagtggagatctgtttaactgaattaaggctgcgagtggttgggagtagcctacgtggaggggaggaaggagcgctggggacttaggtacaccggggccaggccgtgtaagccattgcaacataaagcactttgcaagggccagagggctgatgcctggggggttggggtgggagtgatgaggcccgagtgcccaggtccccccaacctcctcagcccccacacccgagttcctggcgcctatgcctgtgtgtctgagtttgtccctaagcatttctggctcttcttgggaggtgttttgcaaaggtcgaggctccgccggaacccccactttttgagctggggtaaagactactggggtgtcttctaagacgccgattttgagggagattcaccatcgggcaggtggcagggggttctgttggggcagccgggtggcttcctttttggggtgggggagggtaacactttagcagtgatcgaggttcccctgccccctagaaactgagggggtggccgaggttcccgtcccctcgaggcagtcgtggaaaggctgggtttgggatgtgatgggggtagccctggggtcctctcagtcccacggaggccacggggaagggaccgggaccagagcaactagggagaggcccgggttcccctcacccaccctaggcgtgggggagcggggcgggcttggtagggacgctggtcccccgaccgtgggacaggggctgggttgggacgcgggtccccactaggagccgcgggggaggggcagggccggagtccctaccctcgtaggggaggggctggttcgggacgcggctcccccggggcgcaggggcggggccgggtggtacgccgggtcccctcccacggccgtgagggaggggccggcggcgggggcggacccctggcggtcctcctggctggggtccgcgcgctcgcggcagctccccgtggaggtcactgtccgtgccagtccctcccgctgtcccgccctctcccgctgccgccgccgccgccgccgcgcccgcctcagcgcccccactccgcgcttgggagcgaggagccgccagcgcccccgccccgccgccgccgcagcgccctcaggccgccattcgccaccgaaactttccagcgcccgcgctctctccgggactcggcggcggcggggcgggggcggcccgggggcggcgcgcggctgctccggggcgccgggccctcttcggccgccgcacggccgggactcggaggctgccggctggagggaggttcggagcgcggccgggcgcgcggcgccgccacaagttgcgctgctcgcgacgaggtgagtgcgcagggctcggcgggccgggcgcggggtccgcaaacttctgcggggaggcgggtcccgcgctgaccctccagggtccggccggcggctcggggcgcccgaacgctccacccgcccctggaactcctgtaggtgcaggtcgccaactgtccccgcggcgctcggactggggtgcggcgcgctcccaggagcctgaacaataccccgaggtggccgctccccgaagtgccggcgcgccttgcggggagagacggaggtcggcggggggctcctttgttttggggagggggaagtggccggtaagtttagggaagcgctcggcttttcctccggtgcccctttgtctgccgattcaggggcttgctgggcaaacctgcgccaccgcgggctccggggaccggggtggagggcggtggcgggatttccccgctgttggggagaagagccccattcatacccgggacgcgggccggccctcccggacccgggtggaagcgcagcctcgcggagtggggcaagcggcgggcgaggtggcgcgggccccgtgtctgctcagtttctgacgcgcagaaactgtcaaggaagtcgggagccccagtcctccgcccatctccccggcctgagcgcacggctgggctgggggcacccttggcccgtcgagggtctgcagagcgccgcccggggagagcgcagacctgttgctgctcctgggctctgacggggcgggtggggtgggtctcgcagatcctgggccccggccttgctatccagggggaccttccctaacgatgggaccggtgctcggagtggagtatggggagtgcgccttcgggagtcggcgctggccggatatgtgacaactgtgggtcgctggaggcccgcctgcgctgggatagggcctggacttcacgtgcgtcgcctgtgttccgtcagaccggggccggggctcgctccctgcaaggcctcgtgttcccccagccagctgcgttggacgttccaca

SEQ ID NO: 70485 - DNA, 412 bp, Homo sapiens
atggaaggatgaaaccatttgggaatgtgctggaagacatgcttttgaggacaagcaatgcgattttggcattggctgggtttctgagccagtgatgaatgtagtgcattgctatgtgactgggagtgtgatagagagatattccgctggttatttccctccacctgcttcttatcagtgccatagggcagagtctcaattccacttgccagaatgctttctaggaactctttatgctcaatggaggtgatgttttcccacttgctatgctgtgccttagggaacaggaactggtattatcacataagcaatctctaagtcccttggaagattgtctcattcatcaagagggagaggattctgattttcctgcctggctcctccaggaagtctaacttcttgcaggggacct

SEQ ID NO: 70486 - DNA, 1481 bp, Homo sapiens
tattctgctaaaatcgaggcatctacagggtggtggtatttgctgaaggctcgagggttaagtttctggttttttgttttgttttgtgttttttgtttttgtttttgttttttttttgctttctcagtttctagaggctgcccatattccttagctcatggccccttcctccatctttaaagccagcactgcttgttcgagtctttttcacattgcatttcccctttcacattgaaagcactcttctgatgaaccacttctgttaaaaccactcttatgatccaagataatttacttttttaaaagatgaactgattagcagcctgaattccacctgtagccttcattcctccctgccatgcaacttaagttgttcatggtttctgggaatcaggatgtggacaccttgggtggggatggaccttaactctggctgccaccaatggcgcctggtcaaagtatcctgtaggatttattcttggaaacggcgttaaccccaacgccctactttgctggctgtgtaagaaacacgaggtcagtcaggcagtaagaggagcatggacttgttttctgaaacagcgacacaatccattacatattttcgaatgacgagatgagatcagacttctgctttaggaagagtcacagggttttgtggatttgcaggggaaacaggcggtcagagggagttctgtgtcaccgtccagaggctggggtgccaaggagggcagtggcagtgggcttgaagagatgcaatggggctgctttggggctgaggcgactggactggcgtctgattgatggaataccaggagagggatgggagagggaaagagatgagtccaggatgacagttggaaagtcctggacttcggagtaaagggtagcgattgaggagttaaagggtagaatcaggctggggagagcaaatttacttttgaaatagtgacctttggatgctggacagggagatatgaagcaggcagaggaaatatgggcatgaaatagagcttcagcattttctacaaagaagccaccacattcggtgacatgacaagggagtgatgccagagggaagagaggtacaagggcagaatgctggggaaatgcctgtgtttaatgggcgtggagaacccgcttaataaataatgagaatatattgctggactgaaacaaaagtcctcattagctcattaaatgtttcctggaattcccagtcaaatctgtgaaacaattttaatgctagatgttttgtaagtatttctccggaaatctggaaatttgtccacagacccccagacattgtttataaactgaagtcagttgactcaagtattttgcaaatgtctatggaccctagtgtgattaatagaaacacaaattattttaaaggtgtcactcaatttacagtcattctgtatttttgccatttggtattttttcctgaaacattacataataagaatgcagcatgctttctt

SEQ ID NO: 70487 - DNA, 1182 bp, Homo sapiens
gaaaatgtatttctccatgaatctttacatagaaaaatgaaagatttttcctgaatatttatttctcaatatatacagcattaatatgtctgtttttcttcaaagcagaaaaaaaaaaaatcagtgattgcctttgggttttgatcttgctctgtatttgttttaagtacacacctattacatgcccactgtattctaggcactaagctctaatgaaaagtggtttccagtcattcgaatggaacaggaggctcatgtactttgaagtgggtatacagaacttttgcactttggttttattctactttctgtctatgtccttggcactagaatgcttggacgacagtttgctatatctgtggtatttatggaatgagtgaaacatgcaaggagaatgccctggctgccgttctggcttctgccctacccagagcatccagtatacagaagcagcgtttcttaccacagcttgcggaaagacacggggagtagtcggcttgccatataaggaagttgccttcagtggccttgttcattttaggtgttttttaatacttgcttctcttataatacatgttactgttccgtgaggaacctcagcagctcccctaaggggaaaaaaggaggagtacttgaaggagtactgtttatacttcaggggcaataaaatccatgtttatgcacaaagggacctttccacttgtgtgataaccattctacaaggcccttgagttcctgtgaggaaggaaggacgccataaggaatgaaatcacagaaccttattatgaaaatagtaatggtgggatttggaaattatactcaattttttcttctgaaaacaaattgaataccacctgagagttggtgctaaaggccctgattttcgtattttaaaaaatttttggcatagtctttggatttgtgctgtcctaatatggtagccaccagctgtacatgagtatttaagcttaactaagattaagtaaaatgtaaaattcagtttgtctcacactagccacattttgagtgctcagtagccacatgtggccagtggataccttattagacaaggaagatgtagtgcagaaagttttattggacagaagaacaatggttattcagatatttccctattgggaattccagggaagaaagggaaaacttaaatctgaagaagaaaaa

SEQ ID NO: 70488 - DNA, 595 bp, Homo sapiens
gtgaaagtataggatatactatctgtataattacagacattttggcatagttaaaagcagggtttcacaaccttggcattgattgacgtttgtgtcaaataattctctttgttaagaggacctgtcctgtgtgttgtgggatgttccgcagcatctctggcctccacccactggatgccagtggcattcctccgccagtcctgacaaataacagtatctctagacattgcccaatgtttcctgggggtcaaaattacctgtaagaaccacttgttttgaaggatttttaaatatgtcattgaataaacctcaatatataaccctgctgtttgatattggtaatacaggaaacaccagcttccttacacagaccttgaaccctggagcaaatgaagcggtttggaatcctctggcactggaacacccgcaatgctcatgctggtgcatgtattagtcagcgtctggctcttggcccggttaattcagagctcactaaaaacagaaaagggatcaggaggaaactgcagcttctctgtcatgcttagtggcttctgaaaacatattttagatttttcatgttgctttcatgatggta

SEQ ID NO: 70489 - DNA, 855 bp, Homo sapiens
tgttctcttaacagaagggcagtttttgagtaaatgaagcaggacttgatctgggttgtcataaattgtctctccctcaagaggtaacttctcgtgtttgccagttcagaggtgtagggagacatctctgatgtgtagatgtcctagtttggggtgcagggtggctttgggtctgagagcctgctgttggccactgggtgcgcgtgggcttctccacatgacaagacgggaatgctgtgaaggaggccgctgttccgcttgggatgttggccgagcgccgctggcctgtgtccctggaatcctctctgattcaaccattgaacattaactctgtgaggtcacagccaccagcggggcttctgagcccggccctgttctggccatagagggtcaggaggagaagacgtttcacccttggattttctgtgtttggaatccaaggcctttcccgtggagtcttgtgaggttttctcgggaagaaatgatcctctgggagaggcttgggcgcgaactgaaacatctttcaagacactgtggctcttttcagggaaatgctaagccaagcaaacatccactcagaaatgttctgtatttggaagcctcagagtgttaggggaagccttgaccctggaatgtcatctcctggtggtggcggcttcacgtggtaaacaggaggtaacctgggtgtcatgtcacccaggtgacatgacacagggccacacaggatcatcttccagtggcagtggtgaagataggggatatgatttcacatcctcattagagcccacacatgagatccagctttataattggaatcccagataatgagcatgtgaacgtccgtaagttccgcct

SEQ ID NO: 70490 - DNA, 1352 bp, Homo sapiens
ccctccccgccagccccggccccggccccggccccggccccgccccctccccgccagccctccgggctccctccgccgccgggccggcactttctttccaagttacggcgcaagttctgcggcgctcggagcctcccttgcgatcccacggccgggactgcccggagtgcatgggcgcgggccagggacgctgagcggtcgcgccatggagggcgccgagccccgcgcgcggcccgagcgcctggccgaggccgagacgcgggcggcggacggcgggcgcctggtggaggtgcagctgagcggcggcgccccgtggggcttcaccctgaagggcggccgcgagcacggcgagccgctggtcatcaccaaggtaaggcggccgcggggcgcgggcgctgacagccgggagctggccgccctgcggggcgcgtcgaggtaggggcgcgggaggggcggtaggctcgcgcccccgggtctggcgcgcgcgtctgctggggtcacctgccgggcctgggcgccgggaccggcgtgggcgtgtgatcctggcggttccccgcgcctcgcagagtttaaatggctcctgcccggagtccctttcccctccccctccctcctccgggcaggggcctggccgggtcctctggcgctcccgggcccgccagtggcggcctgcacctgcggggctgcctggaggccagcgaaggaacgtgtccccgagccgtccccacctatgtttgcctctctggggtccctggttcggcaccccttggacccgtgcctgtgatcactacgaaatccagagtagcagctgtcgccagcgcaacttctcgattcccttcagcccatcaatgtttactgactttcggcttccagtcccagatccactgcgcactggatacctgcgcaaacttagagaaacctgaaagcctgcttcctaagagcaggacccgagttctaataataataaagaaattccagatgtatctcatcaggaatgttgtgtgtgtgtgtgtggtttgctttagaacattgaattttattgtctcaaaacaaaatccatctggaaacttaccagttgaacctgtatgaacttgtaaaagcaaacacataaacaacagtccagtcaccctgtgttctagttaaaagtgtgtagtggtcattttctctgggaagggttgagtcggacctttcgtgtggacgaagttccttttaaaatgtaaagattcttggcgactagaagcgtttgaagataatttactggttttctcggctttcctgcctctccacagcaggaagaaattaagtgattcctaacccgccgcactggtaatcagtttgggaagtgggatggc

SEQ ID NO: 70491 - DNA, 531 bp, Homo sapiens
tctgtgatcctccctgagagcagcccttctgagtgtcctttcctgcccgccctaggctgccaggctcctgctgctaacttgactgcttctgaagtctctttttaaggttcaatgtcaaggggaggtcagagaggggcgtggttcagcaggaaaagaggaagagagcctgacttgtgaccatcctgggtgccaggcacacctgagcacatgcagccccgagcttttggcctggacaagcccaggcctggcaccgcagggagaactggtctgtggattgtctccacagcctgatttcctcccagactttgccccgcttggagcattccgatctccggtgtttgagggtttcatccagtaaatacggtagtacttcaccctctcagattaaaggtgtgctgtgcagcctgggagttcctttacttgggggtggtcggggaggctgaaggaagccttcctgcacttcttttttcttgagttttttaattattaaaaatggagactgtgcgctgtggctcacacctgtaatcccag

SEQ ID NO: 70492 - DNA, 1599 bp, Homo sapiens
attcttcttttttaaaacaacctttcccctcataaaagtaatattaccattttacaaaaaattggaaggcaaatcatttttaaaaatcccgccaaaggaatgcaaactcttgtgagcatttcaggacattttcctccagtctcttcccctgtgtatctggatttcaatcaggctctaccagatatttttgtatcactgtaactgtttaaaaatctccctgatactgtcctgcatttcctggcataacgtgttgcggctgtgggtctggggcacgaagtaggtgggagatttagagcaagacacagccccaactctggagcttcagcttccccagctgggagccagtgaaacagaagttcccgtctaggctgaaagttttaggagttgacccggcttcctccccagcaatggtctacttgggtctccgctcaaacgatcagaccccacaaaccggatgaagcgctcagggaaggtcaaggaactcccgcctagtgtgggcccccaggttagcccttctagggctgtcctggcggggacgcaaagtggccacctgcccagctgcccgcttccagaggcgtcctccctgcgccgcccgagaggaccggccgcgggctcccccagctcctcagctccctcggccccgccttcaggggcttttcccaccttcgcgggaccagacgggttgtgtgggagaccgagggcgcagcctcccgccaagtgcgcagagggtctccagacagccagagcccgggagcgggtgaagggagggcactgcccgctctctcgggaattgtttgcgcccgaggagtcaccccaggcaggccgcgcccgcagtccgggtagggcgtcgtcctccccgcccgccttcctctacgcgggggcccgggggcggactgacgcggcggcgcccatcctggcctccatgcggtttcccgaggccggaggaaggtggcggagcgggagggagagagcgaggagcgcgcggagagggaggacggcggagggggaggagcaagcggaggggtgggggtggggtcgaggagccgagcgccgaggaggaccccgagggagactgggggcggagcagccggcgacggagaggcgcggaggacgcggggccgggggaggcggagcagcgggagtgggtggaaaagcagaggcggcgggaggagcgggagcctccgtgggagattcgggaggagcagccggcgtgggtggagccgccggcgtgggaggagccgcggggcctgggtgagaacggggcgggacggccggaggcggggcctgcgaacgccctgcccctgctcgcccgggccgcgccgaggaacgaagatggccgggcgcgccgcgggaacggaggggcggccggcagcggcggcggcggcggcggcggctcccgggctgtgacttcgcgcgcggcggccacccgggctacctgaacggagtgggcggcgcgggcagcggcttgctagggcgggcgggcggacgccggtgcacgggcgccgggcggaggatgcgccaggagcggcgggcggctccccgcggccgcccccgcgccccgggcgccgggccttagtgctggcggaggaggcggcgcgc

SEQ ID NO: 70493 - DNA, 4451 bp, Homo sapiens
ttactaatacagtcttgcaccgaaatgatggactgcatatacactggtcgtcccttaacattgtgatgccatatttttactgtaccttttttatgtttagctatgtttagacacacaaatactattgtgttactgtattgcctatagtattcagtacagatttgtatcctaggagcactagactctactgcatagcctaggtgtgtagtaggctgtgccagctaggtttgtgtaagcccgctgtgtgatgtttgtacagtgacagcattggctgacaatgcgtttctcagaacatatcctcatcatcaagcagtgcatgactgtacagccaatgcttttgtgtcacacactttcattatcgttgcattagcttggccacaaatctgaaaatactctgagtgtgtatagaattatactgatttctaggtgtgatgtcatagtattctggaacttggaaattgtagcactcagtgatgctagagacttaaaaaaattcacattatatgattagactttgtttcatagctagcagtcacttaatactggacagatgttaagaatagaagttggctgggtgtcgtggctcatgcctgtaatcccagcactttgggaggctgaggcgggaggattgcttgagcccaggaatttgagaccagcctgggctacacagggagaccctatctctacaaaatattaaaaactatctgggcgtggtggcacatgcctgtagtcccagctactcgggaggattgcttgatccaggagtttgaggctgtggtgagctatgatcgccattgtactccagcctgggtgacagagcaataccttgtctcaaaaaaaaaaaaaaaagaattggacaagttgattcaagatcaagatcttcagccacgtctcagcaccctcgtacaaaacctgggaggcagttgtcatatgtgtaccgacagcttttggatgtatatttaaatgtgcgggtgaacttacttttggaacaaaatgaagtttgcccaaatttctgtgctgtttgggtctcggatggaaactctcagagctcagagtcaagggtggcatgggcagcttgtccatgtggatgcctgggaaagtccttgcttttgtggggtcacggaccagtggtgggagatgggaaagtgggtgaagctagttagaaagaggcagcagaagacagtgaacagttcatacagagttggcttcagtgtattgctggcagcatgtgcccaaggctgtaaaagatcttcccatccttaggttcacaaatgccactaaaatagtggtaactctcaggcaggtgtgactgtgccccttgggacatttgcactgtctggagacattttttgctgtccccacttgggggggatggggtgcgtcctgctggcacctagcgggtggagcccaggggtgtcgtccacacctgccgtgcagtgtggcccccccatagagagtgagctgccctgagtcagcagagctggggctctggctcacacctgctccaggcctccagcagcgagctgttctcgttggcccttgcccttgtgggtcttccgctgcagtggtggcaaatagcaatcactgagcgtgtcaccacattacaaggtgcaaactggcagggtgaggttggtgggactgtgtggctgggtgggtgaccgttttgtggagagcggctggagaggccttatttttcaggtgcctgcaggaggggaggagggaacctgaggtgtctagggtcagaggctttcagggagaaggagctacaggtgctaagatgagagcaatgggccaggaggaggatgatggggtcaggcggtggtggcagcacctcatgagccactgcagggactccaggtgtgactcagcaattctgttgggagctattctgttgggagacttaacatttcattgaggtcgctctgactgctgtgggggactaggagggcaggagctgaagcaaggagactggtttaggagatggcagctgcccccagggctgagcagtggtggctcaggccaaggaggaggcagtggggtggcttcctgaggacctggaccctgcgatttggtcctctctctgcttcaccccagctcctgagaccctccctcagaatccttgctggcttgaggagtaaagggttctgccaaagtggatatcaaggctgtcatgggtggatcagcagaggagctggggttttttcccagactgcttctcagttttgctgctggggctataaggaattccgtggaacaggaagtgtgcagggcatgcatgatgtgcctgttattttagcagtggggctgtgtcctaaaagacagcgtctttggccgggcgcggtggctcatgcctgtaatcccagcacttttggaggctgaggcaggcagatcacctgagatcaggagttcgagaccagactggccaacatggtgaaaccccatctctactaacaatacaaaaattagctggatatggtggtgcacacctgtaatcccagctactcgggaggctgaggcaggagaatcgcttgaacccgggaggcagaggttgcagtgagccaagatcatgccactgcactccagcctggatgacagagtgagactccgtctcaaagaatattcatatgtgcttttggaatgcctgtgtaatgctttaatcagtttagaaactgatattttattattatttaaaaaaaagaagtggtgatcgtttgctttctaacggctgggatggtgtggatctaaaatggtagggcttgaagtccacggtggccaactctacagcgcttttaacacttttcccccaggggaacattgtacgttttcttcaggagcactgtgacactgtttggtttgccgtagataatacggattcaaaaggcattccagatacatcattctgtgattgacctggccgggttaacccaagattgtcaccttgttattctcaatagtaaaagccaaggctctgaaaaccaccccactgaacgcatatcataaacctccaaaatgtcaccatggacgtggcatattgacaaaaatgtcaaggattaccaagaatagcttcttgcattcacatgtagttacaggcgaaggacagagtagctcttgcatttaaaatgcgactgcaatggccagaaccaataattcctgtttgaacaactcccggccctcagctttacctcaaggctttagatagacttactttcaatttttgaaaaggaacacatgtccttattatgctttagaattactaatagagataattctctttgttgtgctatttgctactcagctccttttaaaagatagatgacactgaagttttacgtaaacacatgactgataaaatacttgtttttcctgagtcattgtcagtgtctcagctctaaacctagtgccagctcagtaaatatttgatggaatccaaagtctgcattttcttaaggtgggccagtttttctcttgttatataaagtagagaaacataccaccttcttcccatttatttaggagtggttagtagcccttctctcatctgttggggtggtcatcccttttctgcatcagtgaaaataacaccctatcatttcacttcaagcacaaatgctacttttgtctcatttttggagttataaaaccatgtggattaatcccaaccaggtggtggggagccaaagctaagctgtttctttcacctctgacccgcgcgattagtttgtggaagaacgctctccaaacccataggaagttcacagacagcttggattcctcagagggtcttcggtatcgattgtgtagcagaaaaagcaagcatgcctctgggtctttcctctcttctccatagtcttttttatgtctaactggtgttgggttgctttacctctccacccatagttaaagaaagtgagtatcttggcatgttccaaactactgaaataaatgaaaatcaggaaattttccatgaagcaaaccaatgacataatggtacctcaagcacaggagttactggaattggttttgtgaagtggttggccggtaatgtttgcaaagctgggaggtgtaagaagtggttgggttttttttctcaccaaaaagacagccctacattaaagttatagttctcatattaatgaatgggttttaaagaaactgatgttcttcagttctttttttcctcccatgacttgctatgaaagtaaagatgaaacaaaagtatgactgttaggccatgaatctgttactaattaggtcttatgcttactgggatcaaaagatgggatcaaagtaagaactctccagaagcaagaaaaagaaggtgctgggaaaaggcgtcaattgcagcatagtttgtttataaatgagcaaatgaattgtatgtacagcgatccttcatagtaactacctctactccagcggaggtgtttaataaaacaatgtcttaccatctc

SEQ ID NO: 70494 - DNA, 1516 bp, Homo sapiens
aaaaccatcgcctccctccaaaaaaggagaggctgggtctggtgtaattgttgcattttactgtttactccatgcagaagcacatcacggtgaaatgtacttagtttatgtatttggctggcatttttcttttctctcttctctgccagactttatcgtgtcaggggttgccctcagttatcctgtttctcagagcttttcctgcacttggcaaatggcagtgcccagtcttccacagctgggtggatgagtaattatttgatgacagttctgaagacactttcatcattcaaggtggaattcctagtttgaaaaacagatgctggtgaaaattactcatcatgtgccctccatatatggttcctgtttacagtataggaaaaaacaaacaataaaggcttcaccccaagtcaaccagatatgtgggcattttcctcacacaccaagcaattctccagtggataccaactggcatcctctaattcaactcacttctgataccgtctacctagagttagagtcagatcccacaggttaagttccacaagactgccacccacttcaaatgccagtcacaagtagtagactgtcacccctacttctgactgaccagctatgaatcaggatctccacaaccccctccttggttttgattaatttgtgaggactgcttacaaagctcagggagacacgttccccagtttattgcgtgagtaaaaagtatgataaaggatacagacgaacagccagatgaagaaacacacagaggcctggaaggctcctgagcacaggagcttctgtccctatggagttgggatgcacacggatgcgtctgccaacccgggagctctctgaacccggcactttaaagggatttttgtggaggtttcatcacgtaggcatgattgattattaactcagtctccgcctttctccctctctccaagcctccaatcatggcttggtctttctggtgcccagcccccatccaggagcccaccaagaatcacctaattaaaaaagacctcccatcactcaggaaatcccaagggattaggagctctgtgtcaggattccagggtcaaagacgaaatatcagaacaaaagatgtacctagcacccctattgctcaggaaattccaagggttttaggagctgtgtgccaggaccctggagcagaagcaaatatatttcttcatttgccacaatatcacacttctgaccctgctcacctggaatcttccttgtccatttagatgccaggcacgtgggggacagatgaatatttacctgtgagcatcagtcatacaagtggttctaaacctgggcttccagttcgaatgtagcatttcagaaatactgctgcctgtgttccaccacagaccagttaagtccccatcgaaatggcccctggccagggtggagattcactggctatgggactccatcttgctcacaataaccagtgaatgtttgttgatcatttcaaccccttaatgaccttggaaactagaaa

SEQ ID NO: 70495 - DNA, 1001 bp, Homo sapiens
gagatgttgctttcattactgattttaaatgaaaccaaagagtcaggcaagatggaagatgtaggatttggaaataggcagtcttgtctaagaaagaattgtttgtaaaatattttactccatgtctttgagagatcatgagtctaagtataagaaaattggagataaagttggcaaacatttagctcttccagttgtttatttccagtagattctgttgtttgaaattctgactgaatgggacttaaatagtagattttccatagaactgttattaaaataggagatccaactgctcaagtgaactttggatgtggttctaattgaggtttgaagtaattgtgctgttgaagctactcaatggtgttgagccatcctctgcagtacatagtccacaaatgattttgaattggtttctcattgttggcacctgagttatctgaatgacagccagcctttgattctcagatcaaaggcgttaaagaaaggactccgtccctgcagatgtgtcttctgagcaggtgatgttaatgacaatagctgggaggcagagggcaccagagtggggtggttcacagatgaagacagaccagcattccactagctaagcagaagaagggaagccatgcagcagtggtatagagcccatgccttcagaaacctaaagaaaggaggcagaagcatcaagaaaaagcaccgcagagcggtggatggggtggtagaaattaggaatagccactcgctgctccagcttccgtaacactggaaaaagcttgcagctctctgtgtgcacagaaatttgctgactgtgcctagcgtgtaaacagctctgtggctcttactcatccctaggtattggttactcacgataatgatgccatgtctgtaaaaagactttaaatcatatacactgcactgtttaggaaagcattgaggtatgtgatgtcttttagctaaacattcatcaaaacaaattattagagtaaaagcacgagtgcctc

SEQ ID NO: 70496 - DNA, 761 bp, Homo sapiens
ctagaactgtaagggaataataggtgttgctttaagccattaagcttgtggtaatttggggcagaaaagagcaaactcatacagtgcccttggcctgttctgtcttctctgtctggaatggggtggcttttctccaaattgtcacatgacctctccttttgatcaccttgttaagagaggtttccttgaccatcctgaataaaacctcaccaccctgtcctcaccccggtccccctgattggctgagcaaatgttattacctaaccagtgtttacttttcttactgcctgtctctccctgtgaaaatgtaaataaccctcatgagtgcagggattgtaggtcattgctgtaagcccagcagctacatacttggtgaatatttattgaatgagtaaatgagggtcccgtgtggttgcatttgctatttggcctttgcccctgggacggggcaagccagggcagtcccggggccaggtcagctccaggccaactgctctgctcctgggtcccttcctcaaacctccatccaggtgtgagccttggggtctctcgccttgacttgagaagggaaagggcttcaagacatgggtgcctttagggatctgaggtaggcaaggaactgtctctccctttcaaggactatgttcaaggtgtgatacgtcaacacaccgagctagactaacagttctgggccttcatggacattcaaaagggctactagcctttgaactccataattaatcctctccttgggggttgga

SEQ ID NO: 70497 - DNA, 1830 bp, Homo sapiens
catgtctttttccatccgtgtgtaccaccgtattagttttaattcttccactgcacagatggcttataatttaaaacatcccctgtttttggagatttaacttgtttccagtgctttgagatcataagtaatattgcagcaaactttccctagtcaggggtttgcacaccgttcttccccccacccccactccccacaccccaggacaaattcttggacatcaagttgctggagcacatgataccaacagctgtagggcccggagtaattggcgaaactgtgtatctgtaaggcatttggtaggaaaaatgctaaacagaccaccagaaagattgctcaacttacattcccatgggtggtattggtttttgctttttttggttttgttttttaatcttggctaaaatgacaatttgaaaggcgagggtggagggtgttcagacagctctctcattctgttgagaattgcttggcccagttctgggccttgtctgaattgccggtttgctgcaatgttttttacaattgagcaatcacctagaaaaaagagaaggtgaaactaacctactgcaaaaaaactgctccaggatgaagaaggttgcctgtatttcgtcatttcagccaagccggaatacggagcaaggctgtctgcaccgtgctaccatcctcttcaggctgcagggcattttgtatacccaccacctcccattgatgctggaaaatccggtcacagaattccgtgcagcccagcccctgagggtggggcgtcctgtctccgggacgccgggttttctctggacacgaatgctccgggggtaggaggcgaatgacactggcacggcggggctccggagccaagaggtgaccaggctggctgggcagggctgagtggctgggccgagcacgtgatgctcccagccggcctccggggccctccgggctgaaatcgacatttgcctctggcaggaaaatgagcttgtcagtttctgcctccattagaccctcaacccaaaggagcaggagatttcggtagcgttttaactttatctcagaatctgaaagcggaaggtaagctgcttatcactcagaaaaacaaatttgagaggagtgacctagtaaagtacactgcgactttgttgatttttaaaatctggtgttgaaaataattgatcgctgtgagagtcaagggctgtatttatccccaaattagagattaaccttctgaacagaaatttggttaatttggagggaatcacggtataagggccagggttaaatatagaaggacacgaaagctgatggaataaactgcaagtaaacttaactctagcctgcttgtaaaacaatctatttcatgtctccttcagggctgtgagcaaagggaatgttaaaattgtgatttttaactcaagtgaaagtaaatgaatctatttgcaattggaatacaaataaaagcagtctttgcttttgtccttttacatttcaaaaacgcttgtgtattttggcaaaagaaaagtttatatgtgcactgcttaagtttgaaatacgctatttcaaatttacaaaattatcacagttgtaattttctaaagtctttctaggcaaggctgtttcagttgtgaatgagaaatgttgacattgtacatattttctgtgatagtaaaatgactcacttcttcagaatgtgataaagattagaaaatgtgaaataatgagttattgtgaattaagtcatgtctcagagattaaatgccttgccagaagatgtaagaaaacagagacacaaatacaaccatgctcacgtagcagtgctttattttaaatcatcac

SEQ ID NO: 70498 - DNA, 606 bp, Homo sapiens
tgcgagcagcccccttttcctccagcaccagggaaacacgccacagcctgtaatgcaatgtggagcccgtgtcctctgcccgctgcacaggggatttgccaactccagcgcctttgctttgtcagggctttcagacttctgacctcaattatttcagtgggaggtcatttttgcaagagaggatgcaatgggtgtttgaaaagagaaagtatttcacgggcacttcaaagaagtgttgcaagcatgccaatgaaaaacctcacttttgtaaagtgaagcagtgagatttaactccagctgatggcttgtttgggttgcctttggtcaacttttaattgaaatccatgtgcagaaaagtgcacaaaaggtaagcgtgcagcttgatgaattgtcacaaggtgaacacacctgggtaacagtgcccagatccagaaatggaacatgaccagttcccagaagccaccctcatgtccccttccaagggtaactgctatcctgaataacgccactggttccttctgcttgtttggaactttatagggatggaatctcggatccctttgtgtctgcttttctttgtgtctttcttttacttgacattaggct

SEQ ID NO: 70499 - DNA, 948 bp, Homo sapiens
ccctctcagacatctccaagaccctgccaaccgccagatgaaaccaatcttcctagagcctcgtgtggtggtctcaggcatcgcttgggagtgccttagaaattcggcgtctcaaatgcagtcttgggccacaccccagctctccaggatcagaatctgccgtttaataagaccctaagggatgcatggctcatccaagtcggagtcagatctcacccgaggccgcacattggcagcacctggggagcttttaaaaatgctgatgcctgggcgctgcctcagggaccccggtttaatgactctgggcggggcctgctccttgggctttctgaatgctcccacgtggttcggctgcgcaccccgggctgggaaccgtggggttccctggcagtacccttctggaattctccttccccagcctcccagtcacgtgactgcttaatctcctccctctgtggctctttctctgtcctctgctcctggctccccgatttctgaaggcagcccggtctcttttctttctttgttacctcctggccattctccaaagtgcctctgcgggggcgggagcttgtgagaaattcgagcctcagccatgccccagacctgctgaatcagcacctgcagtttaaccagaagcccaggggatgcgcatgtgcattgtcatatgagaagcgctggtctaggtgacgtaagctgggaaagaaacccagggaatctgctggaatgtagggagcctgggctcaggaactggaaggcgtctgtctgggtctctggcttgtttgttttctagctgtctcaacttgccactgtggtcatttggggctagatcactcttctctgtgcgggtcgtcctgtgcatttaggacgctgggcagcatctctggcttttacccacatcatgccatagcaatccccctccccagaggtgataaccaagaatgtctc

SEQ ID NO: 70500 - DNA, 1502 bp, Homo sapiens
gattttctagaaagtgatttaatttgctgtgttttacaaaaaatatttactaaggcattttcccaatagcattcatttgtttatacatgactaaagacaatttatgggtcactgtattttggaagtgaactagctctcagttccctgaactatatttgagtttacatatacaacgtgttgctaaagcggaagtcaaataataaatgttactttcaaaaacttttaaaaaccaagccatttgcttttaatccagtgagagaaaactgtccaatactcagaagtggaaggagacttgccagttataacaattacaaattgcaaagtctcatcttttctgtagaatctagaaggtagaccaggagttctcaaaatgtagcttggcccaaccacagcagtcacctggggagccggttaaaaatacaaattgttgggcaccttcccctgggaaaacagaaagagaggaaaagctaagtaggaagtaagcaattgctctgcttctctccccactttccctttcttgtggacattttgttatcttattacttactaaggctttgtaatcaggtcccattcttgggcctttcccgagttccttcagtctctactgcggaacaggaagcagaactgaagagagagctagagaaggtgtaagggggttatgagccaatgtcatgccacacagaaggttcaggcatggatgctgcacctcgatcagctgtgctttttaacccatctgactggcagttctaaattgctttttctaataaaaatgaagatagaactcagatgttcacaacgtgccctctctcacacgcaaaaaaacagtcatgctgaagttgctcccagtgtattcttgattacttataaacgtcgttcttaaaaaaaaaaattaagtggtattgaaagggggagagggcaaccagccagcagaggatccagactcatctgtttatgatgaaaaaataatgcccccccaaccattggttggactcagtgtacctcttcaaaattcaaaattcagcttgacagaaaatatataaagctgaaaacaaacatgttaaactttgctctcaggactttttagtgtgacttttataatttgatttccaaatgtctgtgaccttcgtctatcactgtgataggacactctggggaggcagtgtcacatgacatcagacagcttaataattaaatggtgatagtaaatcacaaagaggacttttggccttccacaactgttatctttctccagtgtgctgtttttatttgaataaagtgtcactgatacaggtaatgaacaaattctcaaatcgaatgcatttactataattaaaggcagactttagcactgtgcaattttgactgcaagtgagtttcccaccagaacatgttctatccaaacaattataataaaacagtggcttcatatgtacatattccatcagcaatggcattctttttcacagctttaactccatcctctgtcctgacacgattcagat

SEQ ID NO: 70501 - DNA, 726 bp, Homo sapiens
gtatttctatatatattcatataactatgtctgtataaagtcctatatatgtccataatggaattagtttttgtagttatatacaatgtgcatgtatacataagtacacatatacatatacaaaagcaccttttcagaattatttgagactggctagaattcactcttcacaaacccctcagtcatagcatcccttctgcattacagaaacattccttccttagtgcagaaacagaaacctgtagataatgtttatttaaaaacaactgcctgctcatatctgcaaaaggtcacctggaaatgagcaaaatgacgcaagtgatctattctctgaaagaccagtcaagtgggatttttgcagcaagtataatagattgtgccctggagaaaagcttgccgcttggggaaactttttctcactttatttatataatactctcctagaaggcagagaaagtacacaccctccccttcccaattattaccaaccaggagcaaaatagttattgatgatggccaatgcaacatttcacaactgttctctgaacactggaaagcttaagttcaaagacaagaacaaatactagtctcgtgactcatggaggtaatgacgatgttatagagtaactgattcccattgtgtgagcagattggaaattctctcaaatatgatgcctccttttctcaaagaaaatcgctttttccctcaacttcaaagtcagccac

SEQ ID NO: 70502 - DNA, 521 bp, Homo sapiens
aatctgaatcttttataatggactgcaagttagcctgcccaacttttgccctggaggaagacattgtctttaatataatgaacaacaaacaaacctgccttctcccctggcgcgagatactacctctatctcccaagactgtttgctatacaaacatcctggggaatagtctggaataaaatcattcagtgctccagctcacaagaggtacaaaaaggtgatagatccatggaaaattatttcctaatagacacaattcttatctcctcctggggatatggccaatagttgttactagaaatcagatcatcactggactttctagcagttaccacagaggcagaatttcatttggcactgaatgacccttgagtcatagaagactagaggtaaaaggagcctgcaagaaagtgataagaacttccttaccaacggctccaagctccttatccaaccaccctctgacatcagctgttgtacaaggaaaattggcagaaagcaggtaagcctcacccatagat

SEQ ID NO: 70503 - DNA, 1463 bp, Homo sapiens
gattattctataaaccctgtgagttgtccacatcatttcaattttacaggtgaggaaacttgggaagtttaaggaatcaacccaaggtcacagagttaagatgtggcacgttagggtctttactcgagggtctctgatagtgtgcttctaagtctactgccgggagtgattctcttactaaatagtagttttatcattgtcaaaaaaacccatcaaacatcgttgtactagacctggcattttctttctttctttctttcttttttttttttttttttttgagactgagtctcgcactttggcccaggctggagtgcagtggcgcgatctcggctcactgcaagctccgcctcgcgggttcacgccattctcctgcctcagcctctagagtagctgggactacaggcgcccgccaccatgcccggctaatttttttgtatttttagtagagacggggtttcaccgtgttagccaggatggtctcgttctcctgacctcgtgatccgcccgcctcggcttcccaaagtgctgggattacaggcgtgagccaccgcgcccggccttctttttgtttttctaaacagaggatatgagcagacattgcacaagaaatgcaaatagaccttcaacacatgcagagacactcaacgtcactcagaagagaatgcaaagctacacagagatgccgcttttcagatatcagataggcaaaggtgcacaagttggacaatgctctctattgatgaggctctggggcagtgctctcacacaggctggttagacaatgttatttatttatcaaaattagaaactgcatttgccctttggcccagcaatcccacttctggggatttttaatacagatacatccgccccatacaaactgatgaacacaacgtttttcagtgcacattgctttaatggcaaaatattggacacactccacgtgactagtaggggaagggtcaaatcaattatggtacatcgtcatagtgcaatgatatgcagttttgttttgtttttaaagaggaagctctctgtggactgttatggaaagatctctagggtatactctaaagcagaaaaaagccagggtgaagaataatgtatgtgaaaggccactatttgtgtaagaggagggaaatatatttacatttgcctacaacaagcagaaaaattgctgtagaaattgatatcacaacaggagacacatggtatactataattcacaactttgggcagcttgggaatgacgatgtttacataccaattagggactcaagaaatcctataaagtttttcttcaggatcctagtattcaaattagcataaggatcagacatggaatataatctctgaggtgaatgtttcaaacaatgtttgaagccccctgggatcacacaattaggagttgtgcctatctcaattactttcatactgtttctttacatgatccaatgcta

SEQ ID NO: 70504 - DNA, 1813 bp, Homo sapiens
ctaagatatgtgatttttaccaggctgttgctcataccaacagtccaactccagagaacttgcaggaaaagtttgaaaaagtaatcctacagtgacattgatataaggggataagcaagaaaacgttagtgtaaatcctatttagctagttataagttggactgtggttgaagtttgtttgtagattgatgatttaaacagagatgctttggaaaaataagcaaagtccaaattcaaatatgtcccctgttaagacatagagaagtaaaagtgattcacggagaagattgcagaaaacaaaaatctacctccctctctagaacagtaacaaaagtagaaaaactgaagaatattgaaacattttcattttcccgtatatagattttttttttgttgttgttcaagagttgctgatgggagatagtaactaacctggcaatgagaatggaaaaatgaattgtaaaaaccaaacaaattaaatgtcagatgatgctttcatgtagcaaagggagttatctgtcattcctcgagaagcataagaaaaagaacagatttaccccctacttcatggcaaagacatttggtaaaaggcagactacagcatgactaaaacagaatctcaccaccccccaagccaggggtcgttatcgacagcataaaagctcaggtggcagctgtggaattccaaatgaactaagaaatgtggagcgagccaacctagttcagcgggaaagaatgtcaacaatttccccatggactcctgggagcctgttgtgagcacatctctttatagccttcagagaaacagaggcatatgaagaacagcccggggaactgagaaagagttccagaaagtttagaatgtcagagatggcccactgaagtaaagaaatatgagaacaaaattgaggtggggaaactggtggaaaggagacagtttgcttctgttttctgttgctaaatgctttcctgtgcttgcccgcccacatgctcacaacttatgaggaagcaagaaaagaagctgcactttgcaaaaaatatctaatgaatagaattctactctgtgatgtgaatctatcactaattttcttggtgacatgacaccaccttaagaaatgaaatgaacaagatatccaggacataatcacatttctctgtatatgcacacatacagcttcatatggacatgcaaaattaagagcatatagcatacggccacttatgacagggcatttctatagtccatataaattaagctcctttggaaggagaaaaaaatcccatgctacttatttatgcaagtgttttcaaataagtttctctatttgataagtgtaatgtaatcatacacaagcgagcaatgaaattagaaataaagacattgcatgttaggagcaaagtaggcaatttcataaggagcttttaattctgagagcatttcgaatggagtatttgaattgattttatctaattaatatgctaaattacagtgaacaaagaaagacaagtacaatcgtgtagggcatgtggacttgtagcatttccaagcagggaggacctttgggagtctccagtccaactccctcacttcacagacattcctaccatgtgaagtcacacacacaagctcgggtcaaggctacgtgtccagtcacttatgtatgcatcagaagggggagatagacacacactcaaacacacagagaaagaacatgaaaaacaatgcagcatacacttgtggcaatgtactctcctggaagaaaacatacaggttttgcagagaagagggattcatcagatataaagtcaggcc

SEQ ID NO: 70505 - DNA, 1734 bp, Homo sapiens
  modified_base (1512)..(1734): a, c, t, g, unknown or other
cttttttctttcctgctctgcctatttagaaaatgtatccaaataacccatgatggcactttataacagccagaattgatagtcagatagctcttaggctagtaagctgaaaataagagctaaaccctctttatcctaccgccttaaaacaaaacaaaaaacaaaacaaaaaaaccccaaacaaaaaaaaaagcccagtaggctctctatgtggcagtaaaccatatagtgccatctactggctgtttactaatacgtgttattcaatcagggccaccaaacaaaggcattagatgggagacatgggagaagcaagctctgtcctcactctttcctctgtgccttgagactgttgtatgccctcggaaacacagagatggcaaagctccttctatgagaaagcatttcccatttccactgggacccatttttttctttcttttcttcaaagaagcacacaagaactgaaaaataccttcaatttggcttggccatcaacaaacacatttctaagcaaacaaagattacgtttaactccctcattttcttttcccactcctgttcttttcaataaaaagattaactaaagctggccaacaaatcaaggcaaatatctggagactttgaatcctgcaccgaggcttcataccgcctggacagaaggaggcaaggataattgagtgacgactactctagcatgaagtatgctgtttgtttctacttgttggtttcatgtttcaattcattgtggcatcagggcaaacggatttttgtgtaagctcttagctgagatgatactgctgagcttttgactgtcctgccatttccctccatgaattggcaggaaaaatatttatattttaatcaaatacaaatacacatgaaacagtctttttaggagtttcttttcctgtgtaatgaagtgaaatgaggggaaacgctgaactgactaatcagattcgccactccaaagaagctcaaatgtcatctctatggcaacatgtcagccagggtccgccctcatctcttccctcagactgcaaactgcacgttgccactgctacatgaattaatgtggagaacacactaaaaacagtgagatttggcttatgaagaaggatcttaaggttgatcccattcatgtaacactctatcctgtttttaattttctttcttcaaattgaattagtctttgaggacctgcttcacacaatggcttcactcactggctcctcactctgtgtttcagagggatgccaagttgttgagtcctttgttctgggaggggactgaggtcatttgcactttggaccccaaattgggcaaatctcagagaggtgatgcaatgcagaaggtgagtccagtgtatataccagggaactaattttaccatcttaagaaggcatgcaaaagtttatctattcattggaagatcacctattgaaaaatatgttatagttttctgactaaactcatcacaggctagtgtttacgtaggtagtccattagttnnnnnnnnnnnnnnnnnnnnnnnnnnnnnnnnnnnnnnnnnnnnnnnnnnnnnnnnnnnnnnnnnnnnnnnnnnnnnnnnnnnnnnnnnnnnnnnnnnnnnnnnnnnnnnnnnnnnnnnnnnnnnnnnnnnnnnnnnnnnnnnnnnnnnnnnnnnnnnnnnnnnnnnnnnnnnnnnnnnnnnnnnnnnnnnnnnnnnnnnnnnnnnnnnnnnnnnnnnnnnnn

SEQ ID NO: 70506 - DNA, 2078 bp, Homo sapiens
agcatcttggtgatttctgttttgatttttttaagtatatggttcattttaaattccagattggaacaggctttttcttcaatccaaacctatatggattcctacagccttgagctctttttcaacatttgcacaaatgtatttgcttgctctgttaccgtttagtacagataagaaggttcaagtaaatgtaacctgcacaataagaatataatcactgtttaaaatcaaacttcagaacaggtcaacatggcataatctcctgtataaatgatctgtaattcgcctcttcagatagtcatcttggccctggagtggtttaaaagatagtagctgccaaaaattgttaaccattaaacaaagctttgcttttcttttatgtggcaggaacaaaggtacacttttaaatctgtctctgaaaaatgcattggttttgaatccaattcactctacaacccttgcttttgggatccaggaggaacctttccaaaaagggtttttggtttgttttttttgttttgccttcatggagtgacctgagccaaggtatgtgggttttatttccgggggcaaagttgacataaagaaaacttggaaaacccaagggaggcttgaaaggactgtgtattacactggaatgtattccatcaattgtcagagtacttaagaacactgagtcatcatggggaatgtccccttcatgaagtcaacaacgggttggcattatggagaatattcatctctcctattgaaccatagtgcaatttggcagtccacatatttgcctttcatggtagctaaaaagtaaacattcgtatttatgttctatttcataaaattagaccactatattgcttccaacttcaaagaattctgtagtttcactttcaaggcaactctagaagacagtattttaagcactaggggacttgagatgcatacacaaccagcctcttatggattcacttaatcaccattagaacctgaagatctaagtttctacttagttgtctgtgctcatggtaggtttctcccagggcatttctttcatggtcacatttggtttctgccaaattcttcttttgagatttagaatgtctttttagacctttaccaatggaaggaaaatgccaggtatttcattagcataatggacctatatgccaaagccaatgagattatcatgttacttaccaaattccttagatcatacatgttggcaaagtaatcacttccttccacctattaaatttgttgtttttaatgccagatgagagaaacaaagatacttgaagtgatcttttataaccaagtgacttgctactatgaacatttagggttaggcaattctttgttgggagtggggactgtcttgtgcattgtagaatgcttaccagcatccctgacctctacccactgttccagtagaaaccccctctcaagtcacgacaaccacatgttttcaaacattgccaactatgccatggggagcaaaactgccccctgttgagaacgagttttataaacagcaagacaggtattcatctacagtcttttgaattatttattaattaatacattccacagttggctcctgtgtaaggggtagtgctagacatgagggactattggatatgatccttgcacaaggcttgttttcacagagcttatgagtcagcctaggaagctcacaatctaacctcattcttaacatctccctggcaagagtcatgaatcgggtcagtataggatagggcccatttgtaaacttacaccttgcattggctcatgacctgcctatttgaccctgaatccccaaaccagagcacctgtgtagcctcagtgggcactcaaacagggtgattccattctcttttgaactcttccagggtattagatttgtgtcattgattatctactgcccagtttatagacattgtgtacagttcatcattttcttatttttaatgattagtaccctctgtaagatggatttggctggctgcctggatgaatggttcggttgattattttggagcatcttggcagccaaactaaagagtttggagacaatttct

SEQ ID NO: 70507 - DNA, 1797 bp, Homo sapiens
aaatgcaatttctggcttttattacacaccaaaagtctgtctttcaaataaatcatcaaaggaaaattggggtgcaatacatagcagataagaggcaagaccatcatataagaccatactggttgtacattgcacaactacaggaaaagtcattcataaagtctttgatgtgaatagtgttccctggagttgtacagtgtacaacctgctcagctgctcatgacagacataacagtaagatttctatataattatcataggctatttgttcatgtaattaagtgtttattgggtgctgatcatatgtcaggctctgtgctagatcctggtgagctaaagtaatgaagtctctgtcctcatggagttaatatgacattaggagggtcaaagaattaaggaagcattcatgatgaaagcaagttaggtactataagaattatagggtgacatggagcacagagaagggagcctctttgggaatgggtaaggggagattcctaaagcaattgacattgttgtgaaatattagaaataaacaggaattagataagccaaatgagtaatatgattggaatggagagggggaaggggatgctgaggagggaacattccagaaagactattatgcatgaaaagaactaaatgatgtgtgatgtgctgagtcatcagctacttcctgatgccagttttattggagccaaatgtgcttgctgtattagtgctcatggcagagccaagccatggatcatgcttggagaagatgttatctctaggcagtcacatggacaactgtactttgcacctgcttggtgacacttgtatgtaatcttatgttttgctccaaagtaaatggggtactttactccccactcaactgtgggagctcattaagaagagagtatgtcttactttccgatgtcctttatgctatctttgcatgtggcaggtgtccaataaatattgatagaaaataattaaaccatcatctaacaagataaatcagcataagataaggaattgggattcttttttcctttttccaacctttcaattaagtgaaaccaacatagacatgtaagctgggaagattttgagcctggtttttctgatttcaattgtgttgttagtgaacacatcctgatattgtaatatgacagaaaaggacatttaaacaaacaatgatatgtgcagccaaagatccatgatctcatgttttgattccaatcttataaacacttgaaagtagctttataggtatcttgggctaagacacctctgagagagcatatagttcttgtgcagtcattggaaagaaaacacagtatcctattccaataaaagtttcagacagggcagtaaatcaggcttgccttccagaatgcaacattaggccattggtttgggcataacatttggtaatatcattgagacactgaaggtgatcaccataacccacatatatctgcagttctaagggcagctttatgttgaagccagaacatgacgatggcatgcagttttctgttgttgttgttgttgttttacctcatatggtgaagaccatagagactaccagccagtaacccattaacaagattaacctttgccttgacaccaggggagtgacttttctcaaagctcataaaatatctttgcatctccactgataagtttgcaatgacagtggggaaatttcttaagttatttcactcagcttaaaaatttttaagaagtctgattgcaaaaatgctcattgacctttcaattacactactcctttctcttattagtgacaat

SEQ ID NO: 70508 - DNA, 705 bp, Homo sapiens
atagtcacattgtcacacatctaggagtgacagcaatgatttcagggataatgaactacacaagagcaatgcagaaagtagacagaaattttaactgcacttttcagggtttatgaattacaaatagtagcaatcctttcatcctccactacacaatgattaccttaagtatggagatcaggttgttccttgatgttgccctaggctcgactatgtacagggtctggcacatgtgtgcactccataaatatttgcagaatgactcattgaagcagtgatcaccagatttggtcattcagctcagtttttatctttctatcttctctacaattccaatcaccttttcacatatgatcatgggaatctgtagatacggaaaccagagaggacatctagtctgctatttgtcatcagtctgaaagctacatctattagatgaatgacagctcccctatctttacaaaccccagtaaaagaggcttcaaatcttccttattaccttgtttgagttgaattacactcactactaggaaactcaatctcaatcgcaccttctatcttatgtaagcattcaaaaggcactggagggatggtggccatttccctggatgtatcaagtccaaccataaccctttgtcaaaagcaccaaagaacaatatttttcttgatgcatgatcagatgaaggacgttctctggaatctaat

SEQ ID NO: 70509 - DNA, 969 bp, Homo sapiens
ctaacattgatattgcctgatgactgggctggccaaagtctggtgccaggacccctatcctaccagtggttccagacaccaccgagggaatctggaaggagaaataaagcccacaacacgccaccaagtggctgcaatattactcttgcagtgaagatactttttttttcctcctttgtttccatagggtacttttctaaacctgtccaaagtccctctcactagattccttaactgtcacttaaagtgttatctatgactcagaatttcctaacataaattctataacctccctcctttcctcaggaaagttaccaactgaggcctactcacaccaaaactctgatcctagtggctgtgagatgtctgaatgctgtttaaactgtgcacttacatgtgtttgcaggtagtgataaataagaactcttctttgttgtcgtgcttattcacagtttaacttggcttcctctgcttcagacagaagggaactgaagtaaattcttaagacacacaaggaaagaaagttctttgcgctgaaggcggttcgccaaggtgctaattccatctttggtaggtttctcccaggactgtgttcctcatccaggaatttccctgagcttgatgggtcacacgtccaaattccagctttgaataaataaaccaactaaagtgctcagttgcctcagggattagcagagcagttcacgaacttccatcgccccccagtggcaattagttggatctttttgttagggattttcttatgcttaaaatttaggttatcgttctcccctccaaagttgttttaagtttttgtttgtttgtttgtttaattctcacactgaagattataaagtctttgtgtggaggtatgttggtaatgtcaaattaatggcttctgggtcaccaggtcatagacggataagatgtagtatctgctttcatggttctaagtaaaagactgatttt

SEQ ID NO: 70510 - DNA, 1074 bp, Homo sapiens
cactccttctgccgcataaagcatacatagtagagctcttcactctagggaagcctctggagcagacaaccttccctgccaccgccacattttgaaaaaggctcctggcctggaggggcgggcccagaaagcggcccccgcagcagttacaggccggggcgaggaggggacggaacccgctctccgtgattgacggaaaatattactcttcagcccgcctcccgcgtgcccggaagtcccgccttctaaaaaggaagtaggggtgcgtgagaacgccggcggtgaccgcagccacagcggtgaccgagtgagaggaaggcggcggcggcggcggcggcggcgtgaagtcactgctgctctgggttcgggttggcgactgaaggcggtaccggcctcccggaacagcccgggggagggcttaggtgcagaagggcaggctggccgcggccggtttggtctggggaccacgggctggagcaggtgggcaagcgccgggacggtgtggggaagacacttggcagcttctcgacctctggtgtcccttcgtttcttcgaattcctattcatgcgccgcacccttctcggacccccagcccctcgctaaggctctggggatgggggtcaagtctaggctcaatggacctcccctcctccacccgggtcaccactcctcggaaatcctcgccccactcccgcctcaggcctgtacctcctggctgtgacgtggtttctcagcgactgcctcacctcagtcccaaaatcctcactgccttagatacatacgtgcccccagaggttggcctgggtttcacagtatttccctaagggggcaatatattaaagctgtccttcgaagttagtaccctgcctggtagatgcccatgggatgacaaagaggaggaacaagggttgaccagattaggactaacgagagaatagtctgagtccagagacattaatctgtctctttgttttggcaggtggaaatttaaaattgtttacagtcaacactgtttccagccatgggtttgtctccatctgctcctgctgttgcagttcaggcctcaaatgctt

SEQ ID NO: 70511 - DNA, 536 bp, Homo sapiens
ttcgctaatcacaaaaagtgctgagagcacaatggtcatttttttcccatttaaccctccatatctaagcataccaagaaacaatttatagcctaagaatctatgccattaagcattcattccaccttcttcttggctcttattctggattatttctgtttatatcactggtgatattttgcacatttaaggcaaaaatatcatagaatcactgtcaaactttttgagtgaatacatttctgattacagtactcttttgcctaaaaccctttgatgtctcctccttagctccaggacaaagtccaaattccttagcctggtatccagtgcggtgtgcttttacttagatggaataaaatcaaatagccactacataatagtgaatgataacagtagaagtttactgagcatgtattaggtgctaagcacttcatgtgtgccatgtattcactgcctccaacaatttcattttatagaggaagtgatggaggcacagaaatggatggcgcacagtgaggaaaacactgactgctcat

SEQ ID NO: 70512 - DNA, 986 bp, Homo sapiens
cccatgtcaacccagaacaaatctaagattccaagattcacaggtttagagtttttttgttgttgttgttctggtggtggagggttcagttaacttcctgtgttcatggtcaaagtactgactcaaaacatacttccctatttttcatttatcagtttaaagaaaggaaaccggaaacaaaataaagatgtgaaagataaataatacaagaaaaagcacagtagtaaaataatatttaaactaatcatgtgataaaatgtcagcatttattcatgacatttggctctgtttgtattggatcaccccagcagggcagtggctgtgggttgatttcataatagtgcctcccacatgtacgcccacgcctgacctctgctttgtgcagttgataatgactaaacttcacatattatgctgacaaaatctactccttccctggagggctgttacacacagggaattggagtttcacagctgaacaatgtttctttctcaaattctgggatgatccacttccattagaacaaagttatacgggctgataaattgctgtcttttgccaaagtgttactcatcatcgtatattcacccaacagatgccactgagaaaccccatcctatcagggggaaagaaggatgcagagatatgaatagactgtttagacacaagttgcattccctaaagtaagcacatgacatacgaatttcaccttatgacatttcccccacccccacccccactgactttcatccattagaacgtgttgatggatataccatttcaaaatgaaatatttggatatctgactctgatttggggaaaggggaaatggtgagctaatttcctcttttatcaagctgaatcactaagttcgctctgttgccatgcacgcataagtaatgccatagcaacctctcagtttgctcttaaacacacaacagcagaagtatgcgaataggtacattttttaatccttagattttct

SEQ ID NO: 70513 - DNA, 1820 bp, Homo sapiens
taaggtaaagccttacgatatttctctgtcttaataatatatgtgcttgttgctttaggtagagttcctcagaagcagatactaagataaagactgatgtgcaattgatttattaagaacctgttcccaggagaaactggtaaggggtgagcataacagggtagggaagggaataaagccaagtaagggtgtgatttctagcaaagtcccagtctcagtctggtcctgagggaagctctggggtattaattacatctaaactttgtcccgccttcgccaaagaatttggactttaatattttcacacacatcagtcagtcatgggctgtgggacgccccgcccccagggtgatgtaaactcccaggcacttcctgctctttgtgaatatagggcaactgctccagaaccccacagagtgctcacagatgttggtcattagaagcaaaactacacagaagctggtgaatgggacaggcacacagaactggtaaaagatctgagatattccgggcagagcacagacagagtccactgtgctttttggttgaatacatgttaagctctaaaggctatgtatgaccttgttcctacgtccagaggtcttgaacagggtagaagcttgcaacctccagatttccacctgggtgaggtatgagtcggtcttttcgtactcctccttactgataaatgctttgactgacatctttgcctacattcgatctgtttcatttcatacaccgaaaatcttctgaaatgggtaatctgcccacaagcaccacagggaattcctcaacagctttagcatccgtaatattactccaaaatagcattgctgttctgcctcttactttaaggttgggcagatgccaaaagctgcaaacccatggaaccatccatgaccgggtacacttaccagatttgtttccttctcttaaattaacacaaataggcctacgatgctaattccggagccacgttcaaatttcactgtttcatcaatcatttcgtgagctcattagttgattaacacttttttggtggtgattaaattagtgtacatgcacactcatgtgatcgtgtaatcacttaaaacacagccaggcacatagaagctctgtatcaatgtttgctattattacacaagtacagagcttctctcaggttgtatgatgggatctttgtcctcaaaatcattcttcctgccaaagggcttacaacagtttttctgacctatttcaattaaaaagaaattgtttctatcttgcctttacttctactacttcttactagcactttcttctttcaagtcctctgaggttatcacataagatggggttcctggcaaaattcctcaacacctagcagaaagacagcaaatattccatagactgaaaaatgagaaattctttttaaaaagggcagaaaataaaagaggtcccagaacctcttgacgcatattttggtggtgaagagagagccagagggctttgctccagagtatggttttgtttgtatctctgaaagtgcacgagttgaaattccataaatagaggagcttctgtaccactttctattgctaatattttcttttcctctgacgtctgtcctcagcatttcagttcatggtgagtgcttaataaatgcatgatgacaacagatgttagaaagtgttacgagagcacagagcattctagaaaaacctaggaaaacaccagtgggggaaaacatcattatttaataaatttatgaaaactttaaaaggaaagcatgttgcttttcaaccaaggactttctaacagaacaaacctgtggggagata

SEQ ID NO: 70514 - DNA, 647 bp, Homo sapiens
ggtttttgttttgagaaatgttccattcaggaatttgaaatcgtaagtctaaaatccagaaggttatcagaaaagaaaatccagaaagcaaagatggttagaaaaacataagacactttgtcctgtgttaaaagttgcatcaacaaatggtgagtggaaggaatgtggctaaaggcaagaaaagctaggttaaacagtcctcgctcagtgacgtgggtatagcaattgtcaggaaaaggtccagtggtttcataggccccacttccaggaataactcctctcacctccctgtgttcagaatgagaggacctctagggtaacagggatacctttagatgccaaacaaagaaaattcagagatagcagttggtgtttcaaaattctctcaaggaaaacattcagttgacctttggtgtatcagattaagctgtggaatgtccaaagatatgtaatgtgtactttcctgcatgacagatatcggatcagggcaaaattataaacagcattttcctgcagatgactaagagaagtactcataggaagttatcccctccagaaataatctaaaatagattatatatgcccttcttttctgtctagaagaaagttggaggaaaaataaggagatcattatatttttcaataaa

SEQ ID NO: 70515 - DNA, 2271 bp, Homo sapiens
caggaacctggtgaaggaagcgtgcagaggggaagcaaatgcaactttctggaggctagaacagagaaggggaagttcaccaggtccgcagagattagcctggaagctggtctccagcccggtcctaatccagtaattacactgcccaacggctttccaaaactcaaaagaaaaagcccagcactgtccttcctgtccctggaagtttgtccttcaagtctcccatcacttgtcattcgctcatcaagtatttacttaacatccactctgtgcaggtaccatattgatagcggcctcaagggtgcttctatttagggaatttttagtctattggagcagatagaccgtggggggcattccggggatgctgggggctgtcaggccacgctagaagctgacactgaagacgtcagctactctttaaggacccatctgcctcgctgcccactgctcaacccgtcactgggggctccaggcctgccaccggcttgtcctctgaagggataagcaagtgttctattcacagcccggagtgcccttctgccctcgcccgaggccactgcccgcctggggccagctccagcgctgcgttctccaagcgtggccacactcatcggcgcgctgctctgccaagggggctgacgcggcgcgcacggccagggagctcttgggggcagacgccgtccagcctcccggccgccgggtgcctactccagaccggctctctctctccctaggcgcctcccacgcccgggccggagagcgggcgctcggggcgacggacgaccctgcgcgcacgtgggcgcagcctggaggccgcggggaccctctcccatgggggcgacgggagacgtcctgccggtagaccttggccagggggtcgcgctccccgcccgcacccctcccggagccccggcggggacgtgcggggacgcgcccgggcgggagcgcgcgcgccaggcgcctccgaggtcccggcagcggctcggggcgggcggaggaggggccgagggcggggcggccgcagcctccgccattcccggccccccccggccacggcgcaccgcctccccgcccccgcccgccctcccccaccgcgcgcgctccgcccgccccggagcctcgccctccgccacgatgagcaaatgagcgcgagcgagggcatgaaatttaaattccactcaggggagaaagtgctgtgcttcgagcctgaccccaccaaggcgcgagtgctgtacgatgccaaggtgccgccgcggagggacagggaggaggcgcgggctgggggacccgggaccgggggcgggggcgggggcggacggccgcgcggagctgagggaccggccgggctcctcggcctgcgaggagcggtgcggccggcagggggcgctcacagggcgctacgcccgggagtcggggcggggtctgggatgcttccacttccttccgtcaggccgggcggcgcacgcgcggttgggagcctcgcccatgctttgtcgcgttaccggggctaccgtttgcgcccccgactgcaacggtggccgctgagggaggaggcttctcgaatacggtttctgtcttcgcgttaaatgtctccttctgtgcggcctggtgccgggtgggctcctgtgggacgccctggccgtccgatccaggttctaattcatagttacacggcgctggccgctgacttgcgacgttgtgtccctgggaccctagtccagtttaggccccatcccgcctgtaggccgtgaaccccatcccgagggcaaggttggcccagtgttttcgtaccccagggccttgcagcatttacgttttcaaactctgaaggatttacgtgggtctgaccatagttgatgggaatcgcgccccgggccggtccacctaagtctccgggagctgagccacatcttgcagctcctcagatttgggtggcgggcaggagttggcaccaggtctcccagatccccaaggaaagcacccaggtgctttcatttcagagacctgggttcctagggccacctgggcgaagccttaggcggcagggacaggggcagtcccaggtgtgtctttggcgatgtctggacagctctgtccattagagatgctaaaggacatccctaaagggatgagcatattctgccttcagttccctcccctgctgctcctgtcttttaaccgcgtctgctatccctctttctcctcgccctccagcctcctcggggcggaggggggggggcacgccccatcattagttttagttgttcc

SEQ ID NO: 70516 - DNA, 564 bp, Homo sapiens
ccatcaattattgaataaacaagcaacctttttctttattaaactgatacaatttatatttatttgtatttcacacaatatggatatttattaaatgtatcttattggcttcctttaaggtatctgaaattgagggtctaaatagtagagagaagtgtgcttgaacttaaattcctaatggtggctggcgcagtcctcttatctatgacggagtgaccttgaaggaatgccaaggaagttaatcatttactaagtgtggctttttccccaaagacacttgagctgaggctttttcaagcctgaataaggtcacataattcttcttttcaaagatcgagaaaattacgtcatgcttttgagaattgatatgtagatagttgttatggtaagttggcattcatggaaaagaacatttttttggttaaaaatctatggtaatcaatcagattcttatatatgataagctgtcagaaagtacatgccaaactctcacctcctttagaggtctgttttcaaagaaaaaaatgttttcaaaaattattcattttctcttttaaaaaaata

SEQ ID NO: 70517 - DNA, 1030 bp, Homo sapiens
cttgctatagctgaacaccagtcgcccacactgggtttgcggtgttccggggtgggaagtcgctccgggctgcgaagcacctcgagggatccccccggcccgaactctccctctgtgcccagctaaccgcggttcattggctctccccgcgaggcaggtctggaagatcaagaatgaagctcggagctctctcgcggagcaaggacaccttcgggcttcaggaccacccagggcgtccaaaactgctgccagggctgtgcccccgccccccggcactttccagctccccctccacgcccgctcttcctccctctctgccccctctagctcctcctccggctcctccccctccgctcctccccttccctacatctagccgccgcgctttcccgctcccgcagcagcagcctcccgcgtcgctgtcgctgttgcctccgccacctcctccgccgccgcgcgcccctcggagttccgcgccccaccatgcccaacatcgtgctgttcagcggcagctcgcatcaggacctgtcccagcgcgtggccgaccgcctgggcctggagctgggcaaggtggtcacgaagaagttcagcaaccaggagaccaggtgggggccgcgccggcggccgggctagggagagcgctgggcacgcggctgcggggccgggttgggggccggcgcctgcccgggccacctccgcggacgccgcgctcccccttccggggcgggacggtggcaacgcggcctccgcgcccccgcgcccgcgcctgcgaagaaaccgaggcggggcgccgcgcgtcccgatgcgcgcctcggctgtgcccccggttgcagggcctccggtcctgggaccgcggcgacccggcggtcccgagccgctcccggcctcccagcggtgccgcccggcctggcgtccccagcccggaagggagacgtctgggcggtcacagaccgtcggggagagagtgggcgcagcgggcgggaaccgcatcgggtcagcgcgcggtggagagacgtcctgggttggctgg

SEQ ID NO: 70518 - DNA, 2680 bp, Homo sapiens
tataatttgatttttgaatttcatcttaagacattagagataatgtaactgtagtctttggaattcaacgctggcctccttagccatcacttttaaaatttatgaaaataaggaagaggaaggtaaagaacttcctcattgtccggcagtaaagtcaatggcagagcttgagcttgacttattttgctaagagggaggtgttttaccctataaactccaaattaccttacacccagcaaatactactgttgagtgctcacaaaaattatgctgatgaaacaatatggatgtttcagtgatgaaactttctcttttaaaatcacttaagggtgctttacgtcccacccaaggcaagaggaacgccagcgaggaagacaaagaggcccggggtggggcgcatgcccgccactggactgaaagctgagtcacaggaatcgtacccctgcagcgggccaggccctccagggagggacaccgcgcccttgtgtggagatgtccacagtagacaaaggcagtttcgaaataaaagaatgcctgtcaccccaggtgccaccccgacccttagttattatgcactggtccccaagagcaatttctgcgctgctgttgcaaaaattcatcgtaatgaaataaacgtaaaaggggaaaatgtgttatgaagtgttggagggtgctttgctcatttttttcgccatcgttgtggttagggtgcatgcactagtggaccccgggtgggggtggggctcccctccccaaaagcccggcaggcctccggatgccgttccgagacgcggcgcgaaggagttaagcgggccggcgggtgacatcacctcatttacataggagcgcccataaagctgcgcccgccgcaccccgcccgacaactcggtggtggccactgcgcagaccagacttcgctcgtactcgtgcgcctcgcttcggtgagccccagggcccctgcctccttcctcctgccgtcctgcctccgtccccgccctttcatcatccgcgtccctgtgaaggcattccctaaatccgagcccgagtggttctccccgggaaggctactttggggagctggggggatgcgaaacaccctagatactggataatggggtggggaaatcgatgatttaagaacaaaaccgaaaaactggcgttttgccgtgccgctcggaggggacattaaaaaatttcttagtgtttgcccgcaaaggtattgtgcgttgccttggaggctgagatatgggggaatagacaagtcctttgttctgaggttcatcttccgagccccgagcctcctcccagcctcggacggctgcgcgggctgcatctgtgcagcctggcggcggcggggctgtgctatgacatctttacagtccttcttgcagagacatgtgtgccagggatgccgaattgccgggagagcaggcaagaccggcttcggggcgcgcggcggccgctttgtgtgcggggctgcattgtgacgcgggcgatgaagccggtagggcggtggtcggaagctccagccgcggccgccgcctttgtgagaggactagaaagccggatccggcccgcatccttgcggagaggccgcggctaggaaatggaaacgcttttcctacctgggctccattttaggaattcttgccgatttttcccacttgaatttggaagtggctttcctcttctttccttgtcctagccagcctttaattttaaacgctgtaattaacaattcgcagtggtcaatttcctttattctgcaagattcggctttgagaggcatccgccctctttggtccacagcgttttgaaatatggggaggaggggcgcggggggtgtcgcctctttttctgtagaaagaggaagctcgtgagcgcggaacggcagcagtaggagagcgagaagggtttttttcaggctgcgggtcggagggcagaagtgcagttcccagcccagagacagcggggcgggtggctcttcctcacgctcgctcttggcttgctccctgcagcttttcctccgcaaccatgtctgacaaacccgatatggctgagatcgagaaattcgataagtcgaaactgaagaagacagagacgcaagagaaaaatccactgccttccaaagaaagtgagctccgacccacccccatctttagaaaggctgggtgggagcggccggtgggagggcgggaggctgggagcggccgcgggaagaattcgggaggggggagtgcgggggaagagccgacagttgatgaatgtggcttgcaaaggttaattaaaaatggttttgcagccaacaaacacggggctttagtaatttagtaatggaatatttaatatgccatattaatatacaaacatttatccattaaaatgtatttctatttagtatattcaatatacatattttattccattgtggaataccgtgtagaatgtttatgatttgaaaagatgctttaaatgaaagccctttagtctgtactgaatcctttaatcatctccctccatcttttttttttttttttttctggtcacagcgattgaacaggagaagcaagcaggcgaatcgtaatgaggcgtgcgccgccaatatgcactgtacattccacaagcattgccttcttattttacttcttttagctgtttaactttgtaagatgcaaagagg

SEQ ID NO: 70519 - DNA, 1117 bp, Homo sapiens
agcaacatggagaaaccctgtctctactaaaaatacaaaattagccgggcatggtggtgcacaactgtaatcccaactactcgggaagctgagggaggagaatcgcttgaacctgggagttggaggttgcagtgagccgaggttgcagcattgcactccagcctgggcaaaaagagtgaaactccatctaaaaaaaaaaaaaaaattgcgagattgattttggtcaggtgcctacgtttccgtaagccttaaacaaacatcacccattctactggtcaaacacaccttcctaacaccagcgtgagaggaatgaaaaggtagagcgcttcaagggtgtctggccctcttccattttctacctggaaaaaatatcttcatccacgtactgctgtttgcttataacaattgtgccctgtattatctgagtctcgaggccagtgctaacacagctgcatacctgaacaatgactcacccctaaagtcattttcaagacaccctgaccatgagtttgttatggaaataaagaaaaagtttatgatttcagggagacttgtcctccaaagaggcagagtcctcaatatgtaataataattaatagaaatttctcttgtgtttttttagggtggagcagcagatgatctttttaaagtgtttttaattgttaaactttttggaacacatccatttatgtggttcaaatatcaaaagaatatgaaaaatacagtcccattcgactgattgccctcactctcttgggataatgctttttattagtttcttgtttaacctccgatatatatgcaaaaacaaatatatagttgtaatgtcccctcctcttacacagttggtattataaatcatcttcctaatataatattcttaaacttaacattgttattacaagaataatgcatatttatttgtttcaaataaatcaaacagtatagaatggactgaaagagaaagggaaagttcctctttcaactcattttccagagatagctactgtgaacagttttatgtgaatcattccagatgttttctaataatagtgttagtggcaagagctgcttgtgaaagtttttggaaaattgagagccggttgttaaacgaagt

SEQ ID NO: 70520 - DNA, 2433 bp, Homo sapiens
tgacacattcttatcctatttctttattctgtactttttgtttaactcacatcatagactcactaaatatttatatgaatttattcaaggatttggttcaaaaatgaacatctcttcgagaggattctattgggggtcattcattcatttgttcattaagtcattcagcaaatatcaattaagcccttactaggtcccaggcacggtgctaggcactggggatacaataataaagaaaagagacatgcatccctcacattctaatgagaggagacatgtggcaaacacaataaaagcaaaaattattagtatgttagaagccaacacatgtgatttagacataatagaacaggctgaagagccaacaggcatcatcctaacaatgcagcccggattccaaacagctcctgcaaattggactgagtgtagactttggcatggttttctcagtcacacttataaaagccccatggaaatcaacttccaacaggacttcaaagaaacggaggctgccatgaatggtcaggtattagggaatgaggtcatccttccactgaacactcccctacatcccctgcaggtgtgtatgtcttaagcttttgtgctcacctgcaggagaaaggccagaaagtggctgccacattcttctcccccaactgcaggagtgaggccacagaggtttacctgggaagaatactctccacaaacttaaatctcagcacattacactggtaaatgtcacattccagttccagatatcaatctggatccaggaatgtatgtgcttcactcattccaagcactcatttgtttggtttgggggaggagagacaaggctagagcaatctgaaagttcaatcaagccaaaataccttgctcaaaaactgataaaacagggcccccaatccataaccagagaatgttgggcactttcttctctgcagaaatgtttttgcatttaagtttaggtagatttaagagaggagtgtaaggagagagtttctgtaaccagaggaggggaggcttccccgcctgcctccggagcttctcctccagggtgatctggcagccattcaaggcagcctgaactttctgagagacttgatttcctgttcccactgcctcagccgactggaggactagggtgacccggggtggggagcaagggacactggttagtttaggatcagcgggtgggaactgtttatcccaacatgcttagaaattcttccagcagcaactgtaaaaataaaagtctgaactgtacaagaaacttaagttatttcaacagtgaacttcaatcatgagattcttgaatatcttttgggaagacaagttattttgtttgtttcattcatttaaaatataaaacaacagacttcttataatgcagaggggacctcactgtcacctagttcaactcacatattttacagatgatgcagagttcagaactattcattgacaatggctggggggatgggagcaagatccatgtttcctggctctgaactcagtgcaatttcctccatggattataaagaagtgcaattccaaatgccacgccttagggggaaatttactatatgtaaattatacctcacaacctgacttaaaaaaaaaagtatatgttatccctgcttcctcctgaacctgggtctgcctgacaccaaagccccggggctttccgctctctgcctctcagtagtcttattgtcattcctgtgaatccatggtcctttagtggtttatgtttgaggagggagctgtggactgaataaactatgcagcacaaaggcattaaccatggattaatgggaaagaaaagcttgctgagttctgagtctgacgggtcaagagcttctgatggtgtcatgcaaatttcacttcccaatgaaatcagtcactcttcgtgtagaggggccatcatatcttagccagttcctgcttggggttcagaagagaaaacaaaacagtttgccccatggtgggaaagggacatttggtattctccttggcttcctagctaattacaaagtgttaatgacattcaaaggaaacttgcctccttcagggctttacaaataaggaagggcgggggaaggtgagccaaagaacagacaggggctccagtgaaacacagggcacaaccagtcagctcccagagcgggaggcagccttaatttacaaaggaaatagacaccccagcacaggctgaaattgggtgggaccaagagttcttaaactaatcacagctggtttccaaacctcaaagatttgttattgcaaaaacattctcaagcagtagatgaatagattgaatggcgacagaacaaagaaaagatggagacattttccccacagcggcttcaagacaggttcagagaggtatgaactagcaaagtaacacatttatccaatcaacatttttta

SEQ ID NO: 70521 - DNA, 2555 bp, Homo sapiens
aaggtgggaggagcaggggacatctggattatgggggctctgcctttgaaatggcagctgtgtgggtcctggagggactttaaaccctcagaagacagtggccactgatgctgggagatgggtgagggatcccccaaaaagacatgccatttgagaattgtttctgagctaagaatctcttgacctaaagtaaccatattaaactgaatgtgccccatatcaaagggatcccattctccgttcaaatttgtcttttgtactattaatgcgttaaagactcccaaaccctctgcccttgttgggtactttgttttcaactctgtctcccagatgacacacagaccctctctggtgtcatttcaattctggaagtgaatctgatagctctctttgttgccagaattttctcgctaaatgaggttacaatacttcatatttacaggcttcttaatttcatctttgatgtttttctttttagcaagcaaattattctggctttcttacaaatactcctcagaatcagagcaagggcttcttacccccttgcaagggtggcccaatcactgtctgcttttgatttgtgtactctgtgccctctgtgaacagtactgccacttgaaacccgattcccagagcagtccttggacctcttgtattagcattctccagactgtgaattaaaatggcagttttctgtttcaaccctagaccttctgaatctgaatttctaaaagtggggcccaggaaactgaatttttattaactatcccgagggatctgatgtacactgaagtgtggaactgtgacctcatatcctaaacccacgttctccattgcaaatccttcagcatccttaccttctgtcttacccacccagaagactcccttcccaaatatgcatcctgcatggtgtcattgcatttgctttcctagggagggatgaagataaaatcttgacatgtgctttgtggtgaggggagaaagcagtttttatctgaggctgaaaggttatatcttgagcctcagacagaaaacttaggatgagtcacccaaggaaagggtcaagaggtcagctagcctgatcttatagagggagacagtcttgtgagtctgactaagttaaaccatgatcttgggtcaataaatatttgcagaatgaaacagacaatttactgatattgaaatggccaggccacttggatgatctccctgagtacagtgtctaactttgagattttatacattatagtaaaatagtggccaggcatagtggctcacacctgtaatttcagcactttgggaggttgaagtgggaggattgcttgagcccaggagttggagaccagcctgagcaacaaagcaagatccagtctgtaaatttatatgtgtgtgtgtatgtgtgtgtgtgtataaaatagcttgggcactctccaagctgactgggactcggccttgactctgaccttgattgctcttattctatgaataattccaaaaagattgattatctgattactcaggccactgcaaacaggaagcgcctgattagaagcaatttgcaagagcaagaggaatatgcaaacacaggcacagtgaaagaggcaaaaattgacagaaatttctggaaaatttgcttatgtggaacttgttattccttgatgatgacaaatggataggtgagaacaaagatagctgtaaaaatcgagcacttccaacttcaagacttgaccttaagaatcttctagtacttaaaaaaagtaggccattgttgacaagtataacactgactactttgggatggagaagtagagatgatgagaagtgaaaaaggctttacacaagtcatggaattgagtcagtaatgatctagggggctggaactaaatcccaaataggtctctctgaatttatagatttggtttcataaaaggaaatgacagcctagaaacctctgttgagcttctcttccatttgattgacctaaatttcttttggctgattaccaaagcattacactagcaaaatgtttgccactactatatggacattcaagctggaaatacaatactcaagtaattagaatcaatgttccctatacaagtataagtgatagctcagatgtttctctgcatataggggagaaataaagtcaagttctggcagagttctgtaaacatcagctaatttcagacaattcccacaataccattataaggtacaggatgttgaagtccaaactctaaaataaaattgaataatgttatgcctaattgtgtgacccttaaggttatgctaagagaataaacttagtgtttatttttatctgaggatattaactaaataattaaggcaataacttgtgtttgacagtacagtgtgtctatgtgattttgtcttaagagggaaaatatatgtattagtctgttttcatgctgctgataaagacatacccgagactgggaaatttacaaaagaaagaggtttaatggacttacagttccatgtggctgggaggcctcacaatcatggtggaaggcaaggaggagcaagtcaca

SEQ ID NO: 70522 - DNA, 1267 bp, Homo sapiens
tatattcgtccatagatccatatacatacatgatgcatgtatatttcaaatgggatcatgttgtagccactgtcctgaaatcctgaaatctgcttctttgagctaatgccgtattgtgaagcagcttgcgtgctaataaatatgcatcttcatcacccattgtaatgactacattatattccattgtaggcttgaaaatattaacaactaacaaacctagtgcttcctctgtgcccagcacttttctaagcactgtaacagcatgcctgtgaggtaggtagtatgattactcctgttttacagagaaactgagttaaggagaaggtaattaacttgccatttggggttcaaccccaaatggtccaggatcagagtccaagctctgaacacctggccatgctgctccttgcctcttccttttggttggatctttatgttatgtctaatagttcattattttaaacagtgcaggttaatttaaacctctacgtcctcaaaagagtggtggtggagggtggaggtagaaggggaagcattgataagagatgactttttaataagagagtaacagagagacattcttttggataaaatcagattagaaggtgttcattctcatggtaaaagtgagagctcataaaatcactgtagttacttaggggagggggaattttcaggcatgtgcagaaggcgtatttgcaggactgtgagacagacagatttcaccaattacatagatctacatggaagaaaatgttaatagcaactgcgtagtagaaaagagtagccctgctaatgaaaatacagagttaattttctgtagtctgaactttgacccattgtgaagacagaaatagaagtccttggcaattagagtaggaacttgctgtgaaggaagtgaacattcatttgagactgggtgtggtgggaaataaagcaaatgatgactcacagacagatcagcggacaaggcgaggctaggcctgggaggagcgaggagacctgaacgaagctaggcaggcgcttctctgttcagactcacaaggcgtcactggctcactctggacacagaatatctttactgatagctgcacatcattattatttcattttacaaattacacaactggcatattcccactgtagaatagttttaaagtgagatgaataagaagaaagtaaagtgaaatccatccattaccttagacattcttagatacccatattaagagttggcatatattttcacattattttcctatatact

SEQ ID NO: 70523 - DNA, 2370 bp, Homo sapiens
ggtttcaccatattggccagactggtctcgaactcctgaccttgtgatccacccacctcagcctcccaaagtgctgggattacaggcttgagccaccgtacccggctgtggtttttcttttctcccattctatcacactatttcacaataagaacaaataaaataatcagataatggagaagtttctctatttaatatctctacctatcaccccactgaatgcctttagttctaccaggtattcaaatgaatacatttcattttatatcatttattttcattattttcgttatataactcaacgtagcagtttctaaagggccagagatttgtcttaagtcagcaagcaggaaagtggatgagggaaaacacagggcctgggtaaccttcccattgcctgtgactaatcaagaatcagggctggcttcatgggtgtgcaacttacgccatcacataaggccctgtgcttagaagagccctgcactgagaagggccccgtgctcagaaggacctggtgctgggcttaatgatctgctgtgactggtttgaaaatcttaataatttttgaacaggaggcctcacattgttattttgcactgggcctcgaaaattatgtaaactctattaagaagtgatggtatctatctatgcccatcctgtatcctaaaaaacaagttgtaaattctaaaaacaaattctaaaatgggaataaaaaaagatatgtctaccactcaaggtggaagcgttccaaatgtgggtggatactaaacagaatagtaatagaataactgaagtgtatttaaaaacacagacgacagaccaaagtcagacagaatttttacaaatgaatttactgtgtctcctattgttagcctgatagaagacttcaaaaagtcattgcaggaaactgagctcaagtaagaacaaatagcaaacacattccttctactctccaagaaaaagtggggaggtttcagttcttatgccttcaagtagaactgaacgatgctccccccacccccgcccctccgcccgtgcttggaagggcctggtaaaatcaagagtaaaatgcaatcccaagagatgaactataaagaaaacataatacttttgcaatagcctgctaggcttttccatcatgttttgattgcaggaaagatcaggctttatgggctaaaggaaaaataaatgagttcgtgataagccaaaatcctgccctcccctttccagtatcagcagggagtagaggttctgggtttttcctaagatcagaggaaacatgtcttaaattcagggtggaatcacaactggccaaaaacctcatcaaggccttcttatctgctccatctgctggctctgagtaatctttagcaattgctcaatggtgacgtctttaaagaaatcctgccaagagcaccctttccctagcctttccttagttacaacaatctacaaaagaccaagggtgaacgtctgggtggaagagctggccacctctgtatttgttccttgctacaagtgggtatgagaagtatcctaggagacagattttccaggacaatgattagccaaacagtcctatccagaggccttccaataaaccagattagctgtgatgtgattatgtaattatatggcatgtttcaaggagacaccgtaaactacaatcaacaatttggcatcgcgcagcaacttggggtgtaacctatttcaggaagagccaaattggataccaaaaatggaaggacttgctctcatagggaaagaatagtgaagggaagtgtttggtgatggtgaaaaatataacatatttggaatttttaataaagagtttcttagaagcatcttataacatctgtccacatccctgattcccctttacagctcatggcctgagttaacatctgtccacatccctgattcccctttacagctcatggcctgagttaaaaaaaaaaaaaaaaaaaaaaaaaaaaagacttaggtagaaatagcagggactggcttacctatcgtctatgattttgttgagttttgtgggagggagactctctaatattgttttcctccactctcattctccatggtgcaaatcccaggttggctttttgtgggttttttgttgttgttgttttgttttagttttttaaaatgtataattgacacataaaaatggttttcacataatccttcctgcaacacaaaaggccccaagggcacttacctagcttgccttcaggggtcaattaattcatgatgtgccaggtagtcaggtatactctatggaggaaagcctgtatctttgcatatctaatttatttcccaagtttaaaaaacagtgctgcttttgatctgactagaatggcttga

SEQ ID NO: 70524 - DNA, 3388 bp, Homo sapiens
tgttttatctaaacgtgaaaggaaagcctgggcctggaaagctggagtgcatggagaattcagattattcttcagtctcaaccttcttttccacgctaaggagagcagttcattggcagctctgtataggatgccaaacatgtttatctggtgggtcttcatgttgcctcacttccagaaaatctaagaactttaaaagaccggcacgttgtatacatgtaccctagaacttaaagtatataaaaaaaaaaccctctaatagtagaaggatctcattttaaaaacttttactcatagttgggaacaaactttccctatattaaaaggagacagaacatcaatctgagtgtacacaatgcaaaattctgaaccaattcctgttttgtggaactgttttctggatatattatatgcagtggacaggtaggtccttgtagcccactgttttctctgagggatccagaactaattccaggaaaaagcagaaagactctcaagcttatggttttgatgcctcctttgcccatgaagaagatgctattttccatcagcaatctatttgcatgagccactttgtatgtacaaactaaaaatgaacaacattgaccaaaactctcagcagtgggggcaatgtgatgaatggatgatgactctttctctctcccagccttatcaccaaacccctccatttcaacgctcaaaaaagtaactaaaacaagggaaacccaaggtttcacaaaaatgacaaattcaatttgattagaacaaactcccgctttcctcaaaggtatatgctcctgcaccgttctggctttgaaattgaactttgggaataaaggtttgaaagatcaccttggttttggggggacccatgtggcaaattacctctcctctatttctgtaaaaaatgaggattcagagaaaacttggaaccccaaaacttccctctaaaaatgtaaacttctgctgaagaggatgtcatgtttacgacaataacaacaaccaaagcaggtcattgtgatgacaggcgggttagtcacatgcctgttcacattccatctgcagcttagactctaaaaccctttggcttaacgtctcccctttggaggctgaaaaacaaatagaataatggagaacatttagctccagaggatttagtaatcttttcatccatttgatttataaaactgattggaaggaatggagaagcttctcttgttgttaccatttagctctttaccttgatgctctattttgctcccttaaagcttttaatggtcccagataaatcagagctttcacatcaccctgccactttctgcaatctgaatactctgtgtcctaatctaggatcgaacaagtttaaaagatcatttgcttttgaacgcggtttgctgagtctttctaccctccatggagatcttctgcattgaaaaattcacaattctggttcagcttgaacttgggttttccaaaagtttccactggactccttaaggatgaaaagaggaaagtcttagagacaagacagaaggcaggcgctaaggccagccagagcgaaaaagatttctaggagttagcagccaaataaaacaacggcaaacaaaacaaacccaggctgccctttcctctgctctgcaggctcttatctgttggtgaactcagccgcctcagtctagaatactcagccccagcgtcactgagaaggctgagtttgtgcctgtccgtcccaggtacctctcagcaccctgcacagtctttgttccagcacattcctcatagttttgtaactatttgtccactggtctgtcaccactaacatctagcaccctctcgtctagtctgtgttccttgtgtatattcctaactagtactagtgtgttaactagtagataaattctaccagaatttaaattcttattctcataggacagggattttcgacctcagctcttttgacatttggggccagatcattctttaggtgtgggctgtcttatgtattgtgggatgtttagcagcagccctggcctcggcctactggacgccaggagcaccccccaccccccaaattgctgcagtggaaaatgtttccgggctttgccaaatgtcccctgtggagcaaaatctgcgccgtccccccaaacctcttgagaaccactgctgcagagtaatacgaaaaatatgggttgaatgatttagtccacatggtctctaatcacagggactctccaaagctatcaaaattgtcccttatttttattttttagaagaaagcatcaacgttttactgatgtaaccaccagcttctactttagacacatattttaaaatcacattaaaaccaaagttttttgtttgtttgtttttatttttgtttttgttttgttttgttttttaaagtatccctgagaggtaggtttacttagcagggtctctagggtagtagttaagagcatagagtgtggaaccaactgcttcagtttaaaatccagttctaccataaaccacctgcatgatcttggggaagttacctaacctctctgtgtgaaatcctcagctatgtaatgatccaagtaatctaaattataatgtagaataataataatactgcctgctgaatagggttgttgaaagggttaatatttgagttaatatttgaaaagctcttagaacagttcccagcacaaagtaagcaagatataaacattagctccaagccaagaagtacagggttttcaaaaagtctctaaattcaagcacatttgtttagaactatttggaagccttatgtttctgctgccaaagggatcagagtagaccctgcaatatgtacaaaacatctctatacttccaacattttggaactgaattataaatttccagtcagctctgtaactttctattcttaagactttactttccttccgttgtgacttcaactactcaatgtagaaagtaagaaatacaatgagtctcagaaataaaatgggaaatctcattgcctattgtatgtgctagtcagtgtttcacacttaactactagaggcaaacacaatggaaaccagttggctgccattttgataacacattcaagtttatttgtgttctctgggccattcatctctagggaatttctctttgtttattcttcttccctttttgtgtacaaaaaaagaatttaaaatatgttatgcctttgtcctcactgtgtagtggtgtttagactagcatctgtgataataacagtatttgttgccattcttcaacattgtattttggaggcagcatggtgtggggatgaggacatggctttggggctctatttccagttttacaactaactagatatgtcaccttgggtgaggcacttaatttctcaatggct

SEQ ID NO: 70525 - DNA, 1966 bp, Homo sapiens
aattaatgtatactcagacaatctgggaatcctgttaaaacacagattctgattcagccagtctgggggaggtgctgaaattctgaatttctaacaagctctgagaaggcgccaatgctgctcgttcatggaacccacttggaacagtgagggtctataactggtttcatcaacctctggaacttatgattccttgaagctaaactttcatcagagttcgaagaaaaaaaaagtgtgcaaaaaaaaaaatcacaaaacatataatgagataactcccaaagttattataatctcactactgtgaagttacaagggagtttattaccaaaatacccatcgaacttcaaagtgtcagtacaaacaggcaaccctcaattttgccaaggcctacaatcaatgaaaagtttctattctgttgcctgattggaggtcctgctgggagacacaaaagtcccttccctccttcccttcatttagcaccagggagttcattaccaatgggggctccatgcaaaagaacatttctctatcttctgaaaattgattgctccctctctctgtacatttgtttttcatttacacagatatttcagctatttttgatttgtggtgtaacctaggtaacctaaatcagctaaaataagaactaattccaacctccagatcaaatggcaaaccacacctgagctttgcacagatcaagtagcagaaggaatagcgaggtttttgtgaggagggctgccttctttgatctgatgtggcccggacagcatgggagccggtgcagatgtgtaagagaggctcaagtgccactttggaagattcaccaagaagagtgcattcttctctcttctggtttctccatattgttcttttgggtgttcactttcagattctgctggcctttgcatattagagaagaggttggcaaactttgtctgtaaagggtcagccagtaaatattttcggctttgaaggccacatacacggtctctgtcacaactactcaactgtgccctttgagctcaaaagcagccacagacaatatgtaaacaattgggcatggctatgttccaaataaactttattcatggacactgaaatcctaatttcaattaattttcatttgtcatgaaatattattttccttttgattttttttcaccatttaaaaatgtaaaaaccactctgcttgcaggctgtataaaaccaggcggcaggccggaggacttggctcacaggccatagtttgtctaccgttatacatattagagtcatacaagtacagccaaatgcaacattctcataaaacataatgttaaaaatcagatggagaatagacctccagatttcctgcgtttatgatgacagctttacaggaaaccaaaactgtgtgctggggactgttctgggtattctgcaaatgttttttcgtgtttgtctttggtatataatacattctcatttcctagggctgtttagtttgtgaatgtgaaactgtcgacttcctgtgtcaacttcaagtagctaagttttcctatttgtttgaattcctgtagtggaccctcatcttatatttatttattttggctccaaagactgaccatattcatagtaagagtttggcaatgtaagtagtcattttctgcaaagaaatatattctgaccgaatcatttcactgaaacctcctaaaccatgaacttttattctagaactaataagtgtttgtggcaaagttctttagccctttggcttgtacattttatggctacaaaaaggtagttggaatttttttttttcgtgaaggaatttcatgcatagcccaggactgttttaagtgtagaatttatctttgcaacatgcatcttcaacatgcatgtatgctttctgagtatgtgcaattattctacttttgtgttagatgttctaagcttttgtgtctttcttgtcacatcatatacagat

SEQ ID NO: 70526 - DNA, 4996 bp, Homo sapiens
ctccaatcaggccagttgtatgtgctacgtatgtaggggttggacccacccccttgtccagtgatcttggagaagtcacttaaacgttctcttttggtaactcatctggaattagggaataaattctaagcaacttttaaataagaagcataaaagcatttgagtcttcagatttgcttaattgatcattgcagacggttgtgtcaataacaatgacgtttagaggaaaaggtgaaattggtttctttttcttttcttggacttagctccaggagcagggaacaggaagccattcccagaagttgctttcccctcccacccctgagtacgtggcagggccaacagatgtggctgaatgcccaggcccagggccatgagtactaacctatgccctggaaagcaggaaacacattgtcttcatgtactctgcaatttgggagcaaacaccagcagctcttgcagggggcctttgtgggtccaaattcaatggactgtctgctctctctcaccactgctccacctttcatttgtctgaacgtggaaacacacacacacacacacacacacacacacacacactccaagcgcttttacttttcctcactcaacaacaatgcagaaaacttctgtgaccaaatatgtgtgtgtgtgtgtgtgtgtgtgtgtgtgtgtgtgtgtgtgtgtggcgggtgggggggtggggcatttctctacacatcaaggagcagatcagctgcatgtcctctaattcagttctgacactctctacccagagagtgtcagatcccacaggttgagggctcagtccccaagactgcccccacccccacttctgataccaattaaaagctgcaggttatttttcttgtgcttctgaccgactggctataatcaggttgcccacaatccccctttcttgggttcaattaatttgctggagtggctcacagaactcagaaaaacacttatgtttactcatgtattataaaagatgttacacaggatacagatgaagagatgtgtagggcgtggtatgagggaaggggtgcagagctttgataccctccctgggcaccaccctccaggaacctctacgtggtcagctatctggaagctctctgaatcctgtcttcttgggtttttctagaggctttattacttaggcgtgattgatcaaaccattggccattggtgatacactcaacatctcctctcccttccctggaggttgggagtggtgctaaaagttagtctttctgggtgacaaacccccatcctgaagctgcctaggggctgcctgctatcagtcaactcattagggtacaaaaagacaacactttggaatttctaaggattttaggatttgtatgccaggaaacagggtcaaagaccaaatatacatcacaatatcacaatttgcttgttttttgtttcagcttgggatcagccttatttttaatacacagatgctctcctacacaggaaccccttacttattagggacctttgagattccttttcagatccccctgttgccatggaattgtagctggaacatccactccacttcctactgactggctcctgacatttctcagtccccaaatatctcaccttctcccaacagcctgaatttttgttttcttcacccagtttctgtttgcaatggcatttgtcagattttcacatatcaacatccttcttaataatgagaaccttttaggcattcacattctcatatagatccactcagtcagattgctttccacttagctgaatccaccatatagagaaaaggaagcttctattgcaggaatcagaagacgagatgattctagaacatgaaatattggtaatggctcatcaggatggggtgctagtgggagggataggaaagcctgggagccctgggaaacctgataatcccaaaagaaaggcaatagaacgtggcaaaggagcataggaaaggagcttgttgacccacacctgcgctgcactatctgtaagagtagttctgcgacagcaccatgcagaggaaactcctttagtccacttcttcacctgctcctcttccccttattttcttcttttccctctgcctcagtagagtgagtcaaagtggagtcctctgaaatgtactttggccctagagtcctatggatccgtgttcacattttgaacaagttactcaatcactctgaaccctagtgtgtacatctacaaaacaggggatctaccctgaagggatgctgtgagaattaggtggaataatacatgtaaaggcatctgcacaagttagttttttttcttctctgaaagcactgactggagctgctcaggaagtaccaactggtgccagttccccaatgaagtatgtgtgtgataaattatcctgcatatctatatgcacacacccctattcacttagcttatccaaaaaaactagaagcagcatagaggaacaacattagcagactttgcttgggggaaatcagaccttggattcccctgcctcccaacccccaacctcaccaaattagtatattatcaggttccatctaagcgtgtacccatggcaaatgcactgttcactggtagttaatggaaataatgcccatccaatatggggccaccaaaaccttcataatacagtgcggttgctgacctggaaatgatctcagcaagcatctggcccgctaaccatcaaaccctcccacttccttctatatataggaaaatggaggcacagagaatttaagtgcttttagaaggtaatagttgagaaaaaactaggactagaactcaaggcaccttgactcacaatccaaactatctttctaccactcctggctgagttcatgaatgtaaaaagagactgttaaaaaaaaaaattaaatatataacaccttgcaagatgttaaccgccattacttattgttttaattataaattacccatctttctagatgcttctgcagggatcttgacaagtcatttctgatcctgccctatgaaacaatctctcagagactcaaggaactccagaggctacatctggagggatataagggggaaactgagcaaagaggaggcagtggaacataattttgcaggcagaaatttaaaaatatatgtttagtgcaaactcttctagttctgtgtgattttgtttctgtttgttttaaaccaagaaaaaacaccacattcttgattgcaaggaagtttttaccagaataagaggccatgaattcccatgagccaccctgcctaacaaagccagaagaccccctggcttaaaggttgcaagttaaagattacaggtcaaaacattttaaaagcagcaacaatgcaaactttatataacaaatgacaaagatatataacgatataataataataaagaaatagctatataaaaagagctaggtagatgatggataaatggatgggaaagaaggaaggaaagaggggaggaaggagggagggaaggaagaaagaaagaaggtaagaaggaaataggcctaagtgctgtagttgatctctggtggcaagcaattttagttttccaacttttgcttctctgcattttacaaattctcgtacgttcttaaacaacaacaacaataacacccaccctaatgatcaatgttatttgctaaaagggttgacaatgacaaacacaaaccccttgaaatttccagttctcctttccagtaaatctgcttttgcatgggctcctccgcattcctcattcacatcaaggattcaagaaattccactcaactgaagtccagatcacatctaagattgatcgttccacatttaaacctttctctgatcccttcagtgactttgcctcgcttgagagaaaatgacaaccgactcactgtttcattttcccttccattcagccaagcaatccagggccctattccgtcgtttgcttttcatccatagggcttccaattcacccatgtgaaaacatctttgcaattacagccttcactcagtgtccccaggttaacttcaggaccctgattgaagaatctgaaaccacttgacaaactaatttgaattgcaaacagctaccaacacaaatccaaaccctttcttttagctctgggaaactagctgttttgatgtgttaatcatttagctagtaagataacttagctcatcgttttatctacgaattacttaacaaaattccttttagtactctgaaggctaaaatactgtatatgatatatatctcagctactacaaagtcatgaaataataaaaataagctttgactccaaagaatgtgaaaacaggaaaataaaggttttagtgatactgggatctagtttgttttaaaatccagatgaaagaaggctacttatactgggaaaaatatgttacccagcatgttctggaaaattcattttagagccttggaaacatttaggtgggattgtaggaatctctgagaagtatgaactgtatttttttaaacttctctagagtttatgacatttgtgtttaattttgtttggtttcagagactgaaacatcagctattttaaatttttaaacacgtctttttatctctgatatgtgctaggaactgtgctgttattacagggaaattaacattgagtaagacttggcacagtgaatggcacattgtagagagaaaataaatattcaattaatgaatcacagaaatctgatattattcatgtaaaactgaaagtgtttcctaaccgtatttaggagtaagattttaagatttatgtaccaggttcctggaggcctaatgagccacatatattccttgtagagggtattctaactacagtgtttgctcagctgtgggttaatgaatacgtatctgtgagaagagctcttaatgttgtagtgacaatataaacaataatacatctgacatttatcaaatgcttacttcttgcaagatgtttcccacttattatttcacttcatcctcaccatc

SEQ ID NO: 70527 - DNA, 1290 bp, Homo sapiens
aataattattaatttctccactagattgtgagattctttagagtagaaactttttacattatgtctgcattcatagtaaataagtcttagcacatagaaaacagtaaaaataaaagtgtggcattgagataaattgaattgagttaattaaaaacagtattccttccagctctcaattctggagggttacgtcagttttcagttcatcagaaatggtcacttctttgtttaaatggaaatttaacaaaatagtgtctagttgatgttgacctgaatcagaatatgaaaagtgttttttttgttttttgtttttttttttttttacaggtattttggcttgtggttgtaatttggcaccaaaattggtttcagtatgtttaatgacatccgagtatggaaaccacactgtcatctggcatgggacaattggggctaaggtagaagcagttatacaaatgagaccctgatttgttctcttcttctctcatctttcttacttccattgtcataggagttctttgttcctaccagattgaaataggaatgctacttttttttttttttttttcaagtggatggtgttaatatagctctggggaaaaaacagtgtcacaaaaagcactggaaatgatctcaccaaccaaccatccatatgacctgtattctgggctatgttccagtaatggaaataagtttgctttgttccggatgcatttcctcacccaggatcctttgtcagctctccttccccatacatcccacagtggttattacagacttattgttctggtgctactgcacctccagagtcacccagtggccaagggcactggcttcaggggaagtataaactcaggtttgcacccagttgctgctctactctctagttgttgatgaatgactgaacctcggtcgtcagttttctcatttatgagatgtggataataacaccaactccatcgggctaggtgaagccaatcctataaagttcttcatccagccagtaccctgcacatagtaattctgtaccatccatttccattttatatataaaagtcatatagtttcaatcagatcgttagctccccaaatccacttacgaactgttactttcaggaagttatttctacagctgaatatttcatttataaactgacttcatcctgagggattattcttgtcatctgccacctagaacccccttcttagtctcctaaggcagctgtaacaaagtaccacagactaggtggcttaggacaacacaaatttattctctcacagttctcgagg

SEQ ID NO: 70528 - DNA, 3699 bp, Homo sapiens
tttccctgggtccctctcacaacacatgggaattctggaagatacaactcaagttgagatttgggtggggacccagccaaaccatatcagtcatttactcattgtatgccctatgtaaatgaagaggctatttcctgtcacagctgaagtgtttccatttgatttagttctaggaagtccttaggttctctgccttcaggccctattctcctgcctcagtggtagtccccaaaataatatagctaattactatgctgaagctacccaggataacaacatgttttgaggtgggaaggaagactgtgagtaaggtgcaaaagtcttccatcaatgttggggagttaccaggaggtcagtaggagagacagaaggtgggacagggatgaaatggcatgagctggaaagaggttttttgtttttaataagagttctaataataccatagagaatgttcaggaagaggcaatgaagaataagggaaaatactaatcgtgaaaaaatgaatgcaaactttataattttctaaaatgcccatgggcctccccatgcccccactggaaagttaaggcaatgtaaaactgatctatgaaaggatttggagttgttccacagagcattcagaagctttttattaatcatttattccccatctctgcccttccttcctatgacctcatgctttgtctattctcccaataagcatgtttctgaaatatatgttttccattccaggctgacattcataattctagtgccttctagtgcacaatttgtttcccatttcagtccacttctttcagcaaatagatttgctttcagaagagcagccttaaggaacagctagcataatatatggtccatcaactagagagtgtatttctcaacagcccactcatatttcataaatcacagagcaattattacaactgatttactcagaaaatttcattttattttcaatttaattattttgattgataaaagtaagatggttaatggctccttttcttggaactcttaaaacacaagtatataatatctagctttctaaactagtgaaattcatggtacattgcatttgtgttgtgaaaatcatcatttttgaagctaaattagcctctctacccactgagagaaggtgctcaacttgaagagcctgtggcagaaatctcagctaaaataaatttagcccctcactctctttcccagtgaatctgatatctctatccaatacaacgtctgcaatttaaaacatgtacacaaagataattggaattttcaaagaagcaagtaacttatcaatgactggagatgcctgtttaaatgttctctcacctttatatcttgcaggaagctcttgtttgaccttctgaaaaaaatcttgaagtatctatgagaacagctattatatgaagcagagattataatagatatggagtttaagttgcagaaaaagaagactgaattattaaatgggacatcagaaaataaaagtctttccttttatctagtttggaggacctaaaaaaatcaataggcagaaatttacataatccttattagattccacgagctacaaatgtactattagtacagattgatatgaaagaaagattagttatgcttatggataggtaagaagagacactcttgcaaaatggtagattgaaacacccactgaatcttcctggaagtgtgttgaaatcagttaaagggttaatgacacaaatatgaggatgattttgtaagggtatgatgaagggggcaaacagcctaatcaaaagaaaaaagaaatagcacatcatgcaaggttatcgacactgttctcagtaacctcttgcatccctgctggaaagaaactagtagggttaagtcaagaatttcctattgtgaaaggaagaagtgaccattgatttgtgccttgtcactcaggttaactgccaaagaactttgctcatccaggggtgcataaatgaatgccatgtgctaccaaaaaaaaaagtaataaaggattaaataaggccatggaaaaatgaagcaaactgtcacctggcagtgtctcaagcctgcaaacttgatatccccaactgcattccaaaagtagggttcagagaccacaagtgctacaggcatggatgagttaatatttatatctaggaagaaaggattagcatatgccttccaaagaatgtttcagcaaatgcatgcagctgcctgggcattcgcagttgattgaaatgactcaggggtcaggttttggtggccaggcctgctccacctttactggaatgcatgagtcatgtgttagtcggctgggtgagaagactacactggctttgcgcattcttatatttctcacaatccagacaaagcaaccacatgaccagattccaacaagactaacagtcagataaggagggaaagtcattgaaataaacgagagaagagaaaacctaaatgtgttttaaacttctaaagcgagaactgaacaataaacagttttctacaacagggcttctataagaccagtaacttctatgctccccaaaaagtatttatgaaactatttgagtggttttacatcttgattattcttccacttaaatattgtctttaaatgacctgcctgggtgcatgtccagaatggaaatagcaaaagttagatgtcttacagtccaagctctacaagtcctagctatgtgaccatgttggttatgattagaccaactgcatttggtctaatcctaacctctgggtgttttaataaactctgatagcctccagggattattaaaaagtccagaggtgaggccaggcatggtggctcacacctgtaatcccaggactttggaaggctgaggcaggcggatcacttgaggtcaagagttcgagaccagcctggccaacatggtgaaaccccgcctctactaaaaatacaaaaaaaaattatcctggcatggtggcacacacctgtaatcccagctactcgggaggctgaggcaggagaattgcttgaaccttggaggcagaggttgcagtgagccaagatcatgccactgcactgtagcctcctgggtgacagagtgagactcagtctccaaaaaaaaaaaaaaaaagggccagaggtggtcagtccaggccgatgtagtaccttaacaaagtcactgggcagtcagagtccttctatctgcttcaccattctcatacatacatggtttgcatcctcagtgtcacaatatggctactctggctgcagccatcacatctacattccagggaacaggaaggtaaaaggggtaaggcaagaagaggcacgtcctattcctttctaaggagtctttccggaagtgacacccaatagctttcatattggacagaattcagttataatgccatgcttagctgggaaatatactcttttagttaggctgccaccctgaaaaatatcaggactcattgactaaagatgtaaggaaaagtgaatattaggtaggcaacaagcagtctcagccagagtgacattaaagtcaccaccatctttgagtccattgtctgttcatttataaaatggatgtaaaatttataaaatggataggcaatgcctacttgacatgattggtgaggtgaaaaacactatacaaatattagctgataacagcccccaaaacctagcttagaataataggtatccaagtgtac

SEQ ID NO: 70529 - DNA, 2510 bp, Homo sapiens
aaatccacaggacttcagaagtgacaggcagcacttgtcctttctaatgaaaggttggatcattgtctgttgttggggctgaaccccatctggagctaggggtgggagtcatgagaacacggtacagttcccatgattttgccattggccatcttctctctttgctcttccactatggtctttttcaaattgcatttattctgcaggttcttgactctgctgggaagccttaaatcagagatcctgatttagttggtctgggaattggagtcgtaggcatcagtattattttaaaactccccgattttgaacaattggtattgttcaaaaatccttatgtgcaccagaggtgagaaccactgatttcctctctgcattgctgtttggttgactaatttggggcacttgaccatactagctctgatgaaactgactcaaatgaaattcaaagttcattcatttcaaacatatgacgaaaaaaaagcaggaatccctcccctacccagggcatagtttaaattgtgaccagtgctaagaacggcctctgggtagccaaaaataatgatcacaaagttcctgccctgaagttggtctgatttcttctcacagggaactctaccggccaggacatttctgaattagccacttgcctcagttatgcccttgaacaactttgtagaaagttgggacagagcttattatccatatagatgagttgggtatgttatcaagtagacaatttggggaccctcttggcattctcagtgcaaactatgttggttcctcagtaatacaagtagaacaactggtcacccagacttggagtgagtgtcctgcattgtttgtaaagactgttttgcaagtggaattcaaatgtggtgaattgcactaagacttccaatcaaatccaattgaatgacatgcatatagaccagggtttctcagcctcggcactattgacatttggggctaattattcttttgtgggggctgttcagtggattgtagaaggcttagtagcatccctggtccctactcactaaacaccagtagcatccccacctcctggttttgacaactaaaaatgtctccagacattgccaaatgtccgcttatgaggaaaaactgttcctgttgagaaccactaatacagactcactgttagtttgtcaattaaaaaaaaaccagtgttgttgttttgaaatttctcagtttcaaaagaatcagttgagaagggctcccttccaaaattcttctctgtctgcttccttctagtcccttctgctcccatcacgccatgcacaccagcagcaagagtgagcattgctctgggaccacagttctcaaccaggcgttgctccccaggggatatttggcaatatctggagacatttttgtttgtcaatactgggaggtgggcaggtgcaactgtcatctagtgggtggaggccagggctgctgctaaacattctccagtgcacaagacagcagcccccaacatacacaataaagaattactgggaccaagatatcaatagagctgaggttgataaaccttgattaaaaacaaacatgtccacaaagtccaaactgaagaaccatttggggaaatctttaataatatatatgagtggttctcaatgggggtgatatttgtcctttcgggacatttggcaatatctgcaggtatttttctttgtcacagctggggaagtggggtgctactggcatcaaatgggtaaaggccagggctgccactaaacctcctatagtacattagagagactcccacaacaaaggaccatcaggccccaaattgcaatagtgccaaggcctattactctaggatcacttccgttgtgaccatgggaccccctagtttttccacccctgttgactcagtgctttggcttctgttttctatatctgccctagtgtcacccatccaggtttggatgtctagacctgatgcaactttggcacagcaatagggtggctcagaaggaagcttggcacagagctcagctctagaacagatcaatactgggaagcaggccagttctcatcaaaggttcagcagggtggggtcaggggaggcaagccacaggcataattcaagatggatgacagcacaaatggccctgcaaaagacactatgttctgccaggtgtggggacagagtggctgggaatctgaagcagtaaagagttttactgtaaaatcaggctgcttctgtaaagtcaagcaatgagtaaaagtcccagccagcaagctggggtttgaggacagggctaaatcctggggtgggacaccttgtgaaacagtaagtcaggaccccaggaagaggcaggaacacggatactttgtaaaccagctgaaggaggatttgaatcagggactaaagcacaactgtgggccgagccttgtggttcatgcctggaatcccagcactttgagaggccaaggtgggcagatgatttgagcccaggagtttgagaccagcctgggca

SEQ ID NO: 70530 - DNA, 1773 bp, Homo sapiens
taatagacagcaagaaaaaagtaacccctgacagctctgagctgccccggcagtcacagctgggccttggtgctgcgtggaacataaatacttcacagaacaccatcagacgtggccactctttgaccagatggatcaagacaaaaacaagactccttcgtaatcacgtgggaatgctgaaaaaacgtaaacattgtccaaaccacaaaaatgaccaaacatcccctatcccagttaatgagtcactggtcttgtctcccctccttttaggtaagatttattatgatacttaatcatacaatcgccctccttcctgccagcacccagtccagagtattggattggatactctgtttccctgaacctttccccaaattaccttggggtaaggcatcagcaaaggaggctgtcacattcgttcaaccatcactgtgcttttactggccctttgcaggcaaagaatgagaatatgcacagatgagaagtccaggatgcacaagaccactcaattaacatttactactttcatatcaactgatgcatgctaggatgctaaaaacactttttgaattaattactgcgttaaatagattcacatttatgtctacagttatgtgaacatctagctgagcactgtcttgactgtcctgagtagaagcagaaaagataagttgtaaagtacatcaacaaactttgctgctaaaaaacgaaagtgcagtttctttctctcgggcccggggcggggccatggctcctcctctaggaagccgcgcgagcgcagtcccacggcagccatttccctagcgcgcatgcactgggtcccaggaccacgtgcgccggcctgtgggcttggattggctgagccttgacgttgtcccagtcccggtgatcggaagttctccgtgggcactgggcggctgaaggctccggaactgcgcctgcgcttttcggtgagtcatgcttcaggtttgccagggcctgtgtcccgcaaaaaggcgagcccttattcccagcggaagcccaccccggctcgcggcagctttccggtgcgccctgggcggcgtagatccgaaggtgctcgcacccccgccccttcctctccgactgtcgaggtcgccagagtgggctgaaccctcgggactgtcgctgtttgtgtgctgggtgccgggccgtcatcccaagatgattagcggcaggctttgcatgttgctcgaccccacccaccggaactcgaacccgggctagaccgggcagttgggctggtcccttcctctcgctgcacctttactaggggtcaccattaagggaaatggtcctagtgcagtgctgagtggctgttcagtaaccgctacaccgctgccaacatttggcatcgtttctctccatagagggcggggctccctgtgaagctggggagctgttaagtgggttagggctagaaagttacagtttctctttaggctttaaagagatctaaagatctgaacagatctaggttatttttgacttgttacaaacttctggaaacattgtttccagacctttcctctcgttcttctcagggtttaggccatttttgtgcagatgtgtgcaccttgcttactataatattagctaatctttataagtttttatatggatccaataccatatttcgtgcctacttttcctggcactgtatacactttttggtataggtatgcacctaagcaagcattatccatattagcatcagttctagaaccgtggcgtcccaataatgatagccattag

SEQ ID NO: 70531 - DNA, 984 bp, Homo sapiens
atttttttaaaaaatctaaaacaaccatggtaaagttacatatccaattaataagcaagttaaaacttcacccattcaaaaacttctttactttttatttttggaatataccatattcacttttgaaatgcaggtaaacagatacaggtagctccccggcagctacttttacaacttcagagtgatgtcataactcacgaaattcccctttgtagactgaaacaaaaaattcagaaatttccaaggtgccggtgaggccctgagtcatctggctggattccacctaacgcgcctatctgtgaatgattgaagacagagctgcaaaaccagtttcagtttgtttttttttctctaaccacagcacacccaggcacttgtccaacagtttcccacgtagctcttccccatggcgtgtgacttcatgtgcgtgtcagttgggaagagctaaaagtcaaagttcacccatgtctagcagaaaaggacttgaagattttacatggactgtgtgttggtgtttatgagtccaccaggccatcttgttttgtcttatcttttcagaccgaggatttctattccttcagttttgttttctttcagcagatgggcttttgtcccccagctttgtgaaatctcacgaattgctcagcagaaagtttccaaatgacttagtggatttttatgaacatttaaaaatgaggctgaatgcggcggctcaggtctgtaatcccagcactttgggaggctgaggcgggtggatcatctgaggtcaggagtttgagaccagcctgatcaacatggtgaaaccctgtctctattaaaaatacaaaaattagctgggcgtggtggtgcgcacctgtagtcccagctacctgggaggctgaggcacaagaattgcttgaatccgggaggcggatgttgcagtgagctgagatcgtgccactgcactccagcctgggtgacagagggagactctgtctcaaaaca

SEQ ID NO: 70532 - DNA, 1585 bp, Homo sapiens
tcagagatgacagaggcagtattttaacaagattaaaggaaagttttaatagcttcatttaaaaagttcttgtttttccacagtatcacaactgttttcatttttcatccacctgtttgttctttgtccgtttgactagtcgtttttatcattgtaatcacgacatcctgtgactgtgctcatgaggtctgtttatttccactttacgtaaacttttcaaaatgacagttatttcgtactcgctgtcgcccgaacgcagacgggaggacacttcaggagcaatcgacccgaaggaaaagcacgatccaggccccgcctgcctcggctccaccttccccgcgcccgtcccccagggtctcggccgcgggaccccgccttccaggccccgccccgctttttccctggccccgccccggcccgtcgccatgttgttccctccgcgctggacgggagcagctggagcgggagcctggctgcgctaccgcggctgcctcctgctgtgcaggtccccgaccctctctctgtcctcattgcgcccagacgggccggcccagagctcccgggtcgtctttcgtgtggccgcgaggtgagcgggactcgggactccttcgggaccgggcggagtgcgcgggtgtcggggtctgagggggcggctcgggcctcgggcagctggggcggggtgcggtgcgcgcggggctagcgcgggtcacaaggccgccccgggagagaggacggctggttgtctccctgcctcctctctgacgcaggaggaaagacggtccccacacccttggggagagggactcacagaaacacacacaaacactggagaaagggagatacaaaagcccggacacccgtgcacatacacacggagaaatacacccggtcacctgggaacacacgtacacgccagcctttcccccaaccactccgggacacacatccacagaccccaaaccaaatcctacacccgaatgattaatgtagggaaaacaaaggcgctcccatgacttgattttggcgacctctgaagttccacctagcagaacgtgtttgctcgatgtcttacgaccactcgggtgaggaattcggaaagtaaagccaatcttagaggctgcaggcgttttgggggcattatctgattcagacgctggctaacgtttcacaatcgcgttcccttttttcttccaacttggtaagtaaaaaggcaaaatgagaaatttaagtgctgaacttaataaatagttggtggacgtattgcttttttttttttttggtaagggatgacacatctcgtgactacagttcttttgaggaataacttttctgctagtttccaaatcggcacgtgaccacaatcttttcataggattttagcgtcctgataaaaatcaatgggcagaatttgattgcttctttaaaaatgtgtttgtccttcggtctctggcaccattgtaatggaaaatccctacattgcctgtactctcagaagctgtccagtgtagcaaaactagagataaagaaacctggaacgattcagttaggaacttttaagaagccagcctttagtttttcctttaga

SEQ ID NO: 70533 - DNA, 1854 bp, Homo sapiens
ctcatttttccccttcctgtgatgttctcctttttgctcaccacccgaatcctacccatcaaggccccgataaagacacactttttccacagagatgatctggatcacttccatcttcaaccacctcccctttaaactctttatccagtctacaatgtatcttagttcttgttcaattctctggctgtaacattttcattatcgcttctgagaggtttggttcctttcctttctaattacatttaagcatcatgaggactggctcacctttacctcacagcacacaatggttggtactctaaaacgtttagctctgtggatctcaacccggagcgatcttgcttccaagaggacatctggcaatatctggagacatctttggttgtcacacttgggggagaaggtgatactgacaaaatagagagcaaggatacagctaaacctacaatgcacaggacagcctcccaaaacaaagaatcttccggctccaaaaggcaacagtgcagccgttaagaaaccctgggttagctgaatgacccagtgaaccgcgaaaccacagcccccgagagggcggacgtctgcaggtggaagggctgcgcggatgagccagcggagggctggcaggtccggcccggccaccccggggaggggtggaggtacaggaccaacatccgcgtcacgcaggggctacgaagtcctccagggactcaaaacacccgccccccgccgcacttgctccattccctacctgcagtgggaggccgacaacggaaacgcaatgtcagtttccgcggaagagacccgcgccccgaacctgtagccagaacgccgaagcagttctcgcgataccctgggatgtgctctcgcgatacgtaggcggagcttccggccggtgctgggcaaccaagctcatgcgccgtagctcttcagctcgggaaggctatatttagcaggtttccggaagttgccggactggctgtgaggcggtcctgcctcgctgccttcagtccctagtgtctgggtccccgccctccagccgcctttgagtcgtgcctgggtcctcgcccttgcctcagaaccgcgaagaaaggaagctcgcgtgtttgctagaaaacctagttgggagtgcgaggcagagaacgttcagcacctttgttcctcccgaaccctcgggacagaggcagggttctgagggcagggattccccctcgtcttggccccaccgcccgggctgggcactaaactcgggccgcggcggggcgagcgaggcgggctccggagggagctgacgcctgatgatggcgcaggtagacacacctgccccttctcgggcggaaataaagtcttgttttgtgttcgttaaactttcgccgctaggcctcttatggcttccccggaggccactggtctgttttcagacgttcacgttccctctgccccgcaggtaacctataaccattttgtcttttagtccaacatgtttaccgtggctgatgtgttgagtcaagatgaactgcgcaaaaagctataccagacgtttaaggatcggggtatactggatacactcaaggtatcggatttaggcgtatctgtgtcagcttttacaagtgtaacctgtaacaggtagttcaaattcaatcaaggtttaggttttaataatcgtatgatacatagattgtattggtgaattacatttttatattcccgaataactctgtatcctgaaacattacagtctcttgaaaatgtttgagaaaatgttgagtttgagtcgtcttaaaggagcatattcaaataattaattgaactgacaataagataggagaaggaaatatttgtataatgaacacagta

SEQ ID NO: 70534 - DNA, 2022 bp, Homo sapiens
aacacacagaggggatttatacacctgtgaacttgctttcagttatgcttattccaagttactaaccagcagtctttaaaaatatatggtttctgttcacattgaaattacaaagagactgttattccgataaattatgctagcaaaaatagtatttttaaagggtagctctcatcctacaattcatgggggctgtgagcataaataatcctagaagtgttgcgttactaatctttagtctagattttttaagtaatattgttctgatttgagatgaagaacagctgaatacacagcctagcctgtcaaacgagtttaaaaacatcattcctgaaaaaaataaaattgttcagaaccatctgatctgtactaagggaacatcaagatttcagagctaaaatgcacttcgttggccactggttcaattacagctcattactgataagtgggcagagacacaaggcccataaactgtaggcgccagatgtctcaagataactcccaccaaaagctgacctcctgcagaggttaaagtgcaagagaaaagaaagaaacccgaatttttgagcagagagggcaatatcctagacatccttcaagtatgtggctgtcctgggcgatcttctattcagatactggactggatgggcaaaatccgaattcacctacagaccttaacacggtggttctcggcaccccagaatcacctgggcagctttaaaaactaccgatgccagggccccactattagagattctgatttcattggtccgggatgggggcccggggatcagaattcttaaagagtcgtccagtgattcggaagcactgcagagctgagagcctctgggactggtcccctctcacaattaacctgcaatgatttaggaatctcatgggcctccggccccaccttttgtcgcgggattaagataattatgagagcaacgtgacgtccaagacctcggctctctgcgcatcagaagaagccagggcccggggcgtctaagctcctccctcactccccaaaggaaacccagccgtccccgaagtcacctcgtgggcgcgcagcttgcggatcctgggcgttggccgcgcaggggcctagttttccttggagagacagagggggagtgggggacgcgagggaggcggctgttgccggggcgactggaagcgcgcttccggtgcggaacacgtggcgtggcgcggcgcgccggaagtccccccctgtgtcgcggacgtcacgttcgcaccgcaggcggtgcagtgctggaggccggaagctgcctgctaatcggctaccccgagtggagcgccggggcggcaggcgtgggatggctgcgggtggcggggccggcggagagggagctgcaccgggcggggcactgggactgtggcgggcacccgcgccgggggtcggacggtgcttctgcaccggcgagataagggtcgcttctgcaccgcccgggtttccagcctttaactttttgtcctttcctcagctttcttcgttttccttcccttgtctttacttagccttttctttcttcctttctgttttctttcttaactaaaacagttttagtttcttaatttgtcccagcgtaaaacacccagtctttgaaaatagattaacccagatctcagtttgagtgcgagtccagtgctaagtttgtaacttccccaagcctcgtgtgtctcatctataagatatgcataacctaatgcagagtgcctgatgcattgcagcagacaaaacattagtactaatatgtttgtaattataaccatcacagcaatacctgccctgttaacattacaagagtcattaacaagaaccaagcataaacaattagaagtcttacgtgacatatcatttctggggcaattaccatatttaatactttctgggaatttattccaaggaaaaacaggtacgaaccagatagatgtttattacagaattattttaaaaagtgaaaattggaaaagacctaaatgcccaacaaggaaatggct

SEQ ID NO: 70535 - DNA, 739 bp, Homo sapiens
cacacacaaaggtattattatatatatacccataacaaatacttaagatagttaaggatgcttacttttagtttactgcaattaaagatgctgcaactaacattccagggatgaatttatagacacttatctctaggaaaacccacctttccagtaattgtgatggatttcagtttgcttggttgtatctttcatcccacagtctttataagatggccaatcagaattagtgaatcagtatgtggccatggagtgaaatgactcatggaaataaccttaatgacctaatttcctgttgctgtgctcaaagcagtagaaccaaccagatagctatgtttgtagtctcccagaaatcagaatcagtgaacaacactggaatataaactaaaaaactaattctaggtctctaaataaaatttaaaaagccagaaatggagtagatacagcaggccaatgtgattagattaagtattgtgtttaaaaaaggttgataaaatatattttattgacactattatgtggtgtaaaaattaggattaaaaagcaaatatatgagaatttacatacatgtgtattattatcccaagtagtctgattataaactgtatacttgtttcaataattctttagttattcaacagatttttagaatttctctatggagattgcttttagatccattttatgccctgttgccttagtagcctgaagtgtgtaactagtttgaggtaatgtgaat

SEQ ID NO: 70536 - DNA, 1144 bp, Homo sapiens
atttaataaataatgcatttgacccacaaagaatgattcctgggagctgaaattttcactggagaataatttgtgacaattgaatttgtcttgtctgtaggattctgcagaaagaagtatacacatttttgaacagctgtgtaaagaatatataccagtgagctgtggacatctgcccagtaacagccccatggacacctcacacagagccactgaaactgcccaaccctcctctcctaagcacattagccaacctccccagggctgattccactgcccctatgactcaccgcccatcaatgggtttgaaagaagcctgatgccaggaaagtcccttggccccgcgggcttgctcccatccatgcccccttgtttgccatccatgatgctctctcctaagcgagcaagctctgcgctccacttcagttgctcagcaaagtccaaactccatgctccccctgctcctgaaaaattccagttctgtggctggctgagctgcacacgttctggtcaaatggtctgcagcaaagcacagagcaggcagggtaatctgagtgctacctgtgatcagagagaggcatgcgctcgtgtacacacacacacacacacacacacacacacgttttacctaactggctggaggcccgccagaggccacaagaaccctccagccctaagtctgcgaagttgctgatgtcacgtcctttcccaaactgagaccaatcagtgaggaagccttggagtttatcaggaaggaaactcagtttgtaacttttgagagtgaagggagcagggtgggggtgaaggaaacagctcactttctgcaactgttgttcaccctgctgagatccgtttgttacatggtagcttgttatggagacaagcccgagcacccagagctgagaaagctggttttgcagcagccctgctgaattgcttgcacagtaacatgcacagcacgccctggccatctgtacatgtgctttcaattgtgctgggagtttcttatgggaaatgtgtctatatgttacaaaaaatgtacctttggaaagaaccatttgttcctttcagctgcaagaatttcactaaatgtcctacctcacccctcctccactcattttaacttctaaataaataatgaacg

SEQ ID NO: 70537 - DNA, 2582 bp, Homo sapiens
caaccagagcgaaactctgactcaaataaaaaatgaaagaaaagaaaaaaagaaaagaaaagcataaacaagaaatggcttcaatcaaggtatagcacaggaatagccaacaaacaattgaccagagtgctatgtaaatgctaaggcacaactataatctgcattttaaaatgtccagttgtgaaatacacccaaattgtctaagattctgatttctctctatgccactgcccatggttctgtgtttggtttggatcaatactcactctggcaaccacactgcacattattcagtcatgagtttgcagacattccaatcccagttcttattctccattgagtatacacctggtatggtgaagatgatatcttcaagttattccaggaagaggagttgatgactgccttagtccattttgtatgtctataaaggaatacctgaggcggggtaatttataaagaaaagaggttttgttggctcatggttctgcagactatgcaagcatggcaacagcatctgcttctggccaggatctcaggaagtaaaagctttttggatcccgacccaaatggtggaaggggaagggtgagcaggagtgtcacatggcaagagagggagcaagaaagaggaggaggagaggtgccaggctctttttaataaccagatcttgcgtgaattcactaccatgcgggaaggcaccaagccattcatgagggatctgaccccatgacccaaacacctcctactaagccccacttccaacattgaggatcatacttcaacatgatatttggaagggacaagcatccaaatcatgtcaatgacaaagtattttttaaatgggcataaggtaaaaatagaacaataataatttaaaatagaaacaaaaacaatcaatcactatgaatcctataacacaacctatgaacatttttaaatgctgtatgatttcaggcaacatatttaaatttgcttagcctctgtttcttcttttgttgaatgcaattagtaatacttgccttatccctttggatggagatccaaagagatatgatatccatccaaagggataaggcaagtattactaattgtagttagagttaaatgaaataatgaaaaacagtaagaattaatgaataaaatgagacctgtgaacaatacaaagtaatattgaaactactcaagtccacaaactaaaggaaaaaaaagatttatttaggaaacatattttactttatatataaatattcatatcctcaatgactaaaccttggaagttagataacctatccatctggaaagacacatagatctcgcaggaaggtggtagaagggaatacgtagatttatcaggtatctatttgaattcttagcacaaagataaaaagaactatgaaactatgaaaaaaactgccaagtacattgatttctaaccccccacaataccctcaacttcccacctctctccccacaaaaggactctagcataatccttggggaggttttgtaaattgtgttttgtttgctgatctattgaaatgtgctgtgtcaaagcaatgcgttcaaaactgtaacctgaggctttctgcaatcattgcactactaaaatgaaccttggtattccccctttatagctgtacagatgataatctagtaaataaatataatatgtgatgggaatttaataagggcctcgatcgctcttgcaatgatggcagagacattaacattgagaaacctctatcacttttgagcaagcagattttagttcttacattcattggtttaaatttcctttagctctaaaaagagcacattatatcacctggaattgtcccaagtgaaagccaaaaggcttgtcatagcaataaattgttcccctgctggcttatggctctgtcctctcaaggacctttgagttcttgcttacaggagccccaagcaatgaagaaatagaacaggtgagtcatcccccacatacctggcagataagtcagaggcaccaatcctcagtataagagagtctaagtagcattagaatttgaccaatccacaaagttttaccatgttgactagttaatttaacaaaatagcttgtccatccatcagataaacttttttttaactgaattgattgggaagccagttgattcaataaatgtcaactggtgcaatgatagtcatggtcagaaaaaaaagtaatcattttaaaacatggtcatcattacctgattggatggaagttaatactggtgtaattagcttttcaatctctcttgcacgtgctctctctctctctctgcagtttgttttttgcaactatactagtagagttttgcagtgtcttgtttaatttctttgtgttgaaaattcaaatagatacattacgctccctagtagagcagatcaatgtgtggttgcatttttccagatggataggttatcctacttctaaatatttagtcatgataggaacaattatatattcatatagcaaagtatttcccttaagtaaaccctttccttacttctttatggcctcaggttgaataatttcaatatcaattttaataaagaaaaa

SEQ ID NO: 70538 - DNA, 1809 bp, Homo sapiens
ctataaatgccgcggacatctggttccaggacctggacagtcctctctggagactggtgggcccctccaacacctccgtggcttcccgggatcaagtatcgcacctaaaaggagcgcagagagcgtgcaactggcgggagaggcgtgaccagagtggaaccaaaagtgggtggcctgggaacctaacgcgtgaccagaagtgaaggtaggtaagtgcgcatgcgcaggatgcgagtggccaatgaggaccacaaggttgtagcgtgtggcctgagaggacggccaggactggccagaaaagagaggtgtggaatgcagtaagaaaagtgacgcggaccagaggggtcttgcctgttccgagagaatggaaggggttagccacggtgggaacggccacggcgggaacggccccgccagtgaggagcgcaggcagcaaggcttagcggaagaggcgtgacccaggcgtaccgcaggggcgtggcccgaacgagctgactttagcccttacgtgaaaggcgtggcgtagtcgcaagggtgtaaaaaagaaattcgaattcgcgggacggtcggcctcaggcggagtagggacgtgagcccaagggagggaggtggggtaggcagactagttgtgactggatgatcactgggcgaagggtggaaaagtggccacagatggaaaggcgggctgcggagtagtgaccggcaagggaggtggcgcgaaaagggaagtagggacatgacgtagttggaacgcagagacgtgcctcgaacgtggggggcgcggtccttacgtgtgggcgtgccttgttgctctgaggggcgtaacaaagatggtggagcaggcggagggcagaggcgtcggcaagttagcgtgcaggcgcgtggcagcgacaggagatgtgtagccagagcgcagagcaggtgtggactccggcgctggggaagcgtggccagggcgagatttcagcctgggtcggggacagaatggggactgataggggcgtaacctggaatgacgaaatgacgtttgctgcgtagggacgtggctaaacgtgagggggcgtggccaagatggccgcgtgcgggatcctcgggtaccgggagcgaacgaggaggttctggctcaggtaagtcgttcgggtaagggcgggcggcagtaaggagcgtgggcagcagcagggcgtggtctgcttgagagggcaggaactgtgccacttgccgcaaacatgaccgcgtgccgctatcggccctggagccagagaagcttttggtgcggcgaggttggccggggccctggcggggcttctctgaggaatgggagtgggaggctggcggcggggaaatagccacttccccactctagccctctttctccgctatggggatcaccagacatccttttaggattctgtctattaaaaagtagaacagctttcccagagacattgcgggatgagaggagtgtccagaaaccaaggagcagcaagctgggactccctcgggtctgcattgttgatattcccacctgactatgctaggggctatggacagacacagccaccccagagtagatcaaaagcacagttgtgtcccttggacaaatctgagtttttctgttgtgccttgccccagagccggaggagaggaacctccaaaatgcagacattcttggtggctgggattctgtgtgatattcagcgttaaatgctgctgctctgaggctgctggaaacgcgttagtattaatatctgtgtacttctctcacatttacttttgctggaaaagcttgggaaatgacttaacgaagat

SEQ ID NO: 70539 - DNA, 1972 bp, Homo sapiens
tcctagatcttggtgaccagaaagggtgagggtttgcctgcgaagagtatgggctcaaggctgtctggagcagggtcctgtatccgccctaccactttgcaggacgaaaaaacaatgtattctccttaaaataaattatgtcctaacatgggacgaaacccggttgcaaagcacgagtattccttccctcgtgttaaaaaccaacgctttgattttgccgcaaatcacagggcaccacaattcctcgagactggcattaaaaacaatgggctcagccgcggcgcgggctcggggccagcgttcctcgggtccggccgtcgccggtgcctcccccccactcccgtggccacactccatcactgaccaagcccgggagaggtgacaggcaaggagcggagcagacaatggcatccgccgccgcgcagggggcgccaagagtcctcggccgccaccgcccccggcccctcccgaaagcgccccgcaaaacttgaggcgattcccgaaccacaggtgccgcgaggctgtcgcggagcccgggactggcccccacatccccgggcgcggcgcggagtggtgcggagggcgcggacacggagagaagtgagttgcgggcgcggcgacccagtggcgggccgggcaggctcggggtggggtcgtcggggcgcgcgcggggtggcggggggcgcgcccagtcctccctccccctctcccccatccccggcgccccctttcgcccccagggacttacggcggccgcgggccgcgggcgcggcggagcttggccggcggcggcggcggcggcgaaggggaagcccctgtcgccgtgctgaggaagagaagccgtggtgctgtggggaggacacccggctggcatagggcaggcttaggcggagaggggagggcaagctgacagaccccgccccgggggccggacgagggaggagccggggctgcggcgagctgaggggcgggctaggcgacgcgcgggaagcggctcagcggtcgccagcggcaccggaggcagcgcgggtaaccgctgagtccaaggcagccgattggaggtttcttcgctgaggggaggtgcgaaccggaagccgggccacgtgacccggaagcggcgtttgccgggcccgagcgcccgcgcgcccgcgcgctcttgcaggtgcctccgggacgcgcgcgggcggctgtcctgcttgtttaatgataggaggacgggattctgcagcgtccttagcctagcgggtggtgcggggcagggaagttccggacagcgaagagccacgttcgagctctaatgattctctgtgtccccagagaggaagtgtgaagtgtgacggctgacgaggagggtgggaggagacgagggagtgctgcaactctggaaaaacaagtcagctcttctgtggagctcgtcacgcattcacgggccttttgctatcattctgcctcaaaattgtccggaatccgccctctccttcccattgcactgctccagccctagcccagacaccttccgccccgagcttcgcgggagtctgttccctgggctcgcctcgcccatcctcggtgctgcggactggatgagttaccgtccgttcggctgaaaagcccggacagcacctcaccttcgagatcccgcttccttcacactgggtcgccccaccagccgcctgggttccagtttagcactgccgacgacttgctgtgcctggcatgtccttgctcccaaatgtcacatctatgaagcctcaccctaaaaccctgtaagagcgattccctctttcacccacatgcccgttagcctttatttagcacaccttaaattgtattcattttgcatctcaatctagttcacagcctggtatataacaactaataaatgtgagttgactgataaagactataaaatgataaatttgttaagagctgtaatgctgagcgtaatgcctgggcataatggatgttcata

SEQ ID NO: 70540 - DNA, 1091 bp, Homo sapiens
tatgttgttataattgttggattttcttgtcagtttttgttgttattttgttaccttgcctaatttataaattaaacattataataaatatgtacgtttaggaaacaaagatagtatctatagggctcagtgctatttgtggtttcaggcatccactgggggtcttggaacatatcctccacagataaggggggactattgtataaagcacttcctcattttttcttacaccggcatagtagcccctaatttatttacccatcccccattgatgaactttcagattgcttccaatatctggctattatcaaccatattgcaatgaataacatacacaatttcatgcatgagcaagtgttgctgtaggaaaaattcttaaatgtagaactgcagaaacaaagagcatacgcttttataatattgacagttattctaaattgctctctttaggacttgaacattaaagtttgggagtgtctgtttcctgggataatcgtaggcatcagagagcaggaaagctcacacaaattataaatcaaagtgaagaagtctagctgaaagttccagatgtttagcctactgactacctgaagcctacttttctttccatcttggctcctgcttattgtgaagaaagagtaattgattctaaggttagcgttccagagacagtgaggagagttggcatttagttcatttatccattcctgcaggatcagttgtcaggaagcaaattctttctctctttgtcaccaattccacttatttgaagtctgcctaatgactaagccagtggtcaagtctctaggaatatttaaaatactcaacagcaaacgttaggcagcatgagaaataccacagtcgctaagttgtgaacaaaataagctgatgacaaagaaatgacacagctacagtggatgcaaattagggctgtccaagctccctgtactccaggtgagaagaggtaataccagagatgtctattagatgcagtcacaaaactctttgagaggcacactgacagccttgccaagggagctcttgagtgtgccaaaacaaaggggctacaggctccaggcaagtctgaaatc

SEQ ID NO: 70541 - DNA, 1033 bp, Homo sapiens
cagacctaatggcctagctgcatcatataaaggttccacactgaatgagctgtgtggattccaaaagcttaaaaagcaattcctgggtttgagttttccattaaaagagttttttttttttttctttaaaagagccaatttgaaatctactaagattcttcatgatgttattcctgttctgctgtgtacctgaagtggtgactcaatttgtagcccattagacaacatgtgggctaaaccttcagaaaaatcagaaaatggacccagagtctgtataacaattcaattaaaactatatattgatctcatcttataatctaggcactggcacaagggatatggaggaaaatcgatgtattagttatttttttctgtatgacaaatagcttcaaatatctcaagaacttgctgcaatgaatatttgtttgatactcatgagtcataagttggctgtcatttcaacgatctcagccagcctaggcctaacactacctatggttcatgtctgctccacattgtagaactcaatctgaagatgcagtggctctttgggccatgctgttttcatggatggtaggagctcaaaagagctggtggaaacttgcaatacatgtcagtcatgaatttattgcctctcaactccaaattcacccttcagtacctgctctgcaacaatagcctagactcttaaatcatttgtcctttatagtaaacatgtcctttacagtcagctttgtcagtagagggacattacaggaggaaggggccttcttttcctggttccattgtgctgatttttgctttttcttgcttctgctgcatggtgcatgtgtatagggacatctagtggtgctctgtcccagctatgtgctgagagtgtaccaaaactcagtaatcccacagcctggcccagatccagtgatctccatgacatggccctcctaaggtggacactggtgaactccaggcctcatgctggcagtgataccccagctctctctgcacacccacccaagtgccttggctcactggt

SEQ ID NO: 70542 - DNA, 1598 bp, Homo sapiens
aagagagaccagagacaatggtgaatgaaatgggttccttctcaccctgactgttgccaggactcaacaaatatagagggaagggctaagcacagaggagagaatggacttagatcctaggggcacacaaaggaaagaggaaacggaaggaactggcttcaggtgtgtacttcctttaaagactctcttattacaaagtagtttcggcttttgggtttggtctgaaacagtcaagcaaatacagtgaatcactgagtacctttccctcctgttgtttttgtaccacgctgcttcctgttttgccacaaaaagatgatttatctgcacaagagacagtaattgctggatggagacatggaatccaaagttccaaaactagaataaaatgctactcaaatgactcaagattctggttttatacttaaaaatatgtttcccaaaaagctgcatttctgtgaactgcaaactgaaccccatctaagtttttgctttctgatatacatcaagcactgtccaaggaagagagttttactctgatctgacaaataaaaactggaagttgtgcctaaacttggtgtgtagtgattgctcccaagagccttgcaggcagccacagagacacacatgctagaaaacaatctatgaactttagactctgatccttctctccttacttaaaaatggaattctaggcctcaggccaggcacattggcccatgcctgtaatctcagcactttgggaggccaaggtgggcggattgcttgcgcccaggagcttgagaccagcctgagaaacaaaaaaaaaaaaaaaggaattccagaaagagattagatgctctgtttctagatttaaacaagcaaacaaacaaagaaaacttgcaattacaagcaccttcatattctcctgaaatgtatttcttataattacatgaagcagtctcattcttttacattatgtgtcagcaagaccatgcaaatttgtggttgccttttatacgtgagacaaattgtttagacaccagaggagagagatcagcaaagaattgcaatgatttatttaatggaccattatttcccatttgatttttttattttcaaaatggtttgttagttagactcgtgtaaaaaaagagttaacagcaggcttgaggctgctatctttcaaagggcctgcttgcagggttagttcttggctggtgtccgggaacatggctttcggaatgtgtgctccattactaactgataaggtcattttgctgggcttaggctgtttatacaatgtgatctatggtgaacacctgctttccctctggcatctggaattttggtggttgctaggtagaaaatgcctatgtgaccagccctcgaaatatccctaaactctgagcctcaaactggctcatctgggcagaaacatcacataggcatagttgcattttcactgctggaaggaaggcgaactcgacgtgacttatcacaggagagagatcataggaaacgtgcaaatgaatttctccagactccacttatctttcccattactgatcttgctgtgcatgtttactttgccaccataataaatattagctataaggccg

SEQ ID NO: 70543 - DNA, 2055 bp, Homo sapiens
tgttagccaggatggtctcgaactcctgaccttgtgatcctcccgcctcggccttccaaagtgctgggattacaggcgtgagccaccgcactcggactatttttcattcttttaattgcaagatgaagagttctgaagattgattgctcaacaatgtaaatgtacttaacagtactgaattgtacacttagaaacggttaagatggtaaatcatattaagatggtaaattttgtgtattttaccacaattaaaattttgtaatttcacaattccttaattttatcaactacccagtgtccaaatttccagttcttataataagtatcatactatttttttcaatgtgtttgctgaattaggatcctaataaaatgcacaaggggccatgtgttacatctcttaagtcttttttaatctataggttccccaccacactcctctcttccttgcaatttatttgaagaaacaaggttgtctgtcctgtggcttctcatagtctagattctgctgacagcatcccattgtgttgtttaacaccttattctgtcctcttattccctgttgggcttggcggctttgggttagttttgaattgggctcaggaggaggctaaagacatccaattctgcgggaacgcagccctgcgggacctgaaaaggcgagactaagtcaccagccaagctgcctagaggcaatcttaaaatgggactggctaggactgtgacaaagacaccgtccacatgcctactaggtcagtcacctacaaagctggcgaatgaggaaaagagggaaggcagggctacgctgggaaagctctttgtcccctatccacgcgcacaaaacagttgtcacaactgacgtcaccaggggcggagcctttggacggaagtgacgcttgcgcggccgcggcggagtcgtcatagaggcggggctgcggcggctgcggtgttcctccgacttccggacatctccctgggagtcgcgcagagtggagtcaaaggcaaccagtgctcgctgcggtctctggggatcgggaccgcggcggcggcccgcgagcgggatgttccggggcttgagcagttggttgggcttgcagcagccggtggcaggcggtgggcagcccaatggagatgctccacccgagcagccgtccgagacggtggctgagtctgcggaggaggagctgcagcaagcgggagaccaggagctcctccaccaggccaaagacttcggcagtgagtctaccctggctctgggaccgggaaggggggggcgcattcctcctctgggacggccctggggcgcgggcccgactggctgggggatgagggggccgaggtgggaggcaggggaggaagatgtgtctgtcggtcagtcctctccgggtcgggagagattggtgaggatctggacgaggccagagcttcatctagcagtcaggtcctgtccctgaagttcctggtgacaagtctacaaagtttgcagacattggaatcaggtatgcagtcaagcagtgtgacccgacgtcttcaggtttgacaaggaatcttttttgttcaactcgaaaaccttcatttacaccccccagatcggggatagttggcgagcttgaattggttgaaaaaataattttttgcccctaggtcagaacgtgttgtctgaagtaaactgacagttactgaatgtcaatgtctgccccggtcaaatgctttttaggtacagagacctttttccttaaggagggagagaaaatgccaactgtctgctatacgcaagttgcagtactagatgttttatgaaagatatcccatttcatctgttaaacacccccagtgagttgggggaacaagcccagagttattgggccaaagttatactgatagtgagtggtagaagtggaatttgagcttcgatctttctcattttaaagcccgtgctctttccaagtttacagtctacaggggttgggggacaggtgataatagacgtggagtaaacacatgctgtagtaattctcatttctggagagaccatggtgggcttcagtgatcaca

SEQ ID NO: 70544 - DNA, 521 bp, Homo sapiens
cctctgccccccgggttcaagcaattctcctgtttcggcctcccgagtagctgggaccaaatcattctcttttaaagcacttgctgggtcaccagccttgtgtttccttcaggcataggtgccctaactgccaggtcctccttattgtttgctttgtggtgatgcaggcagctatcccatgtcactttactttgactttgtgaagcaccgtgtgttttgcaagatttgccttttcactttgtgttgcaagaccagtagggctagaatctagtgttaaggcagcaggagtgattcagtggcttatgaattagtccacatttttgtgacttctgcttcccatcctaatcttgccgctgtgggttgctgaatgaggctattaagggccccctgcctgtgtgtcttctgtgccgatcacgcagatctgcagccttcactctgctctctagctgctccgtgctgcttacatgggagagatcttcagacgagcttgccattgtttttgtttccactctaaacacccc

SEQ ID NO: 70545 - DNA, 706 bp, Homo sapiens
aacccgtctcaaaaaaaaaaaaaaattgttatctattaatcgcattttgtggaataccctgtgtttttttctttttttatcaaaggacaagaggaatttccttcgtgaccctccggctggcgtgcaatttaatttcgactttgatcagatgtaccccgtggccctggtcatgctccaggaggatgagctgctaagcaagatgagatttgccctcgttcctaaactgtaagcagagtgttctccagcgtttcctcatggcctccattatgtgctcagtatcagcacataatgatggaaggggccaaaagggtctctatctgttcataaaagcaggccccgcagccctttggcagctcccctggtcagggcactctggaatcaaaaccaaggtctgacttggcaggaaatacagggtagaggtgaaatgtgcttttctatcccagttacaaggtagaacacatttccctacagaaaccacaaacatgctgcatcaccctgaatcacattctggtctctgaggctcatcgggatcttttttccaagctgactgcattttccattcaggctctgccctccagtggcagtgttcctgctctctttgctaaggcttttcctccaacagctcttctgggctccacaaatcccagcttgtcctgtaggctccagtgcatgcatgatgcattctggaagcctgccttggtggtgc

SEQ ID NO: 70546 - DNA, 1667 bp, Homo sapiens
aattcggttcagcaaaccgagtttgttgaaaaaatttaggtaatgaaacgagtaaatggggtgggagaaagcaggatacattcaacatgaatgaagtgccaagtaagtgtgcagaagccggggcggttcaaccaaggtgaatagaatgcggcacctatcccgcgggagctcgggacaagtaaaccgtggtaacaactctggtggaggggcagggctcggggcaggtgcccgagcacgaaacttcaaattctaagagccaatacaccttccgtcttgaaagtcgtgaagtattttcccttatccccaaatcattcgcgcccaattcctaagaacggcaacaaaaacaaaaacacaagaatgtgtcgccgatcgtgctccttctcaaacacggggatatttctaaactttccgcgaaagatcataacgagtaccttcctatagccagacatcgcccccagaaaccgcaagtcccactaggatgcacacgaagcacactgggtgcagcactctccccttttcagaacgccgccttatgtcccaatcccgatccgagcctgcgagctgtggccgcacgccctgctgggacttgtagtccactcccgagtcccattcccgatccgcgcagactcacacggcctctatctgcccttcggtcttgctgaagcccagcccagtattcaatgctccccatccccatctcgctccgtcccctcgggggccaacctcctccggtcacgtgggaagtctcacatgcggcgattggtcgtgggggctcgggggcggggcgaaaggccctgcgagattctgtgccccttgtcgggccgcttgtttggctgctgccgtcacctcatggcgacgcgggtagaggaggcagcgcggggaagaggcggcggcgccgaagaggcgactgaggccggacggggcggacggcgacgcagcccgcggcagaaggtcagtcagggggacgccctcgttgttgtcgggcccgggggatgtttgggctccctttttcagggtccacctcttctctctccctggttacctatagccacgggacgaacatccggtcttcttccctcccgggggtgacgacagtgggagcaggtgggggggggtgggaccgcgatggatggggtgggaagggacgacggttggggtttggcggcgcgcggcggggaagccgggagggagggcagggggcgcacgcggttctaagggagaaggggtgcgaggcgggggtgcgccaggtgtgacagccacgtgcggccagcaccgcggggatccgggcgccaggcgttccttctcccagtcaccgccgtcaccgtgctcccggcgctgagcgccgccgtccgggggctcgctggggtcgtgggctcgccctcctggcgtcgggcaggtgcgcagggcgcgctgcggggtgcccccgggctgctcaggctaggctgttgcgcagtaagataaccgcgcgggagccggggtgtgcttggccccccttcccccgcccccctgcgctccccgccactgcgcgggcgggcaggcgagcgggtgagtgtcgcagggccggtgcgagcgggacgctcggcccccgggacctagaccccggggctccgagggcttggctgcacgtggggccggggatggatggggaggcgatgctggaggacctc

SEQ ID NO: 70547 - DNA, 1006 bp, Homo sapiens
ttgaattttcccagccccttttactgattttaatatgattttgagcgagttacttaatctcgtcaagtctcattttctgtacctgggaacaataaggcctgtatctcagtgaggcagggaaggttaaatggggtcactttgagaatacctcacacagtgtcagcctgaggtgctaaaggttccctttacttatttgataagttcctcctagactgggaatctgaggcaagctaaggatgtctgtctaggaaaatgcagaaatacacacaacttttcccaactgctccctctgaaggtccactctagctcttgctggcaaggactgggtaatttgtgtcctctgcatatgcctggccctggtcaaaggtgtttgagctcatgtgagcaagcagtagttgaaataattaggaagtgaatgtgggtgttggtagaagggaaagaaacctaaaaatttttttttccttctggttttaatttccatgttcttagttttgaatgttttgatccaaaaagctattacaagtagttgatgaatgcagagtacttcctcatgttcatttgcaaaaatttctatgatagttgttctttgctcctgtcatttattattgataaactggtgacctcccattttgaaggcatctcttggtcagttagtgagtcctcttagctccaagtattgagacagtggaaggaagattgcgaaatatatcctttgaccggaggggagtggctagggtgagggattattcgtgtttaaggctcttgtaaacaaacacttgtagcacagtgttgtgcttctctaaaaggtacacatgctgctcacaagatgcagatgtcatagcttttgtgtcttgattttctgcagggaagggttctaatagaaatccatctggaaactactcagtgttggtttcattttcatttgagattggaatttaaataaatatttcctccccttttgtttttccaaataaggcactatattagagctcttcattttgctgtt

SEQ ID NO: 70548 - DNA, 2087 bp, Homo sapiens
ctggccaacatagggaaaccctgtctctactaaaaatacaaaaattagctgggcgtggtggcaggtgcctgtagtcctagctactcgggaggctgaggcaggagaatcgcttgaacccgggaggtggaggctgcagtgagccgagattgtgcaacagaataatagtccatctaaaaaaatgataatgaaaataaaaaaatcaaaaccccaaagcacaataaattgattgttaaaatatttggatttcagcgggttttttgccaggtaggaaatgatctagacagacattcacccagcaaacagcaattcgggacatgcctggctttagcactgagtcactcctggccttcaacattggagtaggtttcagctagaactggagctggtttattttccaaagggttaaggctggaatacttgggcagtgttcccagtgggcccaggaaaattcaggggcaggaggtatccagttgaagggcatcatccttcaaaaagcacaagatcatagctggaagttgaggagcccatgttgcttgtgagttgttgggttgaaagcagggagaagatctgtgatcagtgtctgaagtcagaaagctggcaaaattcaggaccccaggggatagcaggccaatacggaagtcaagaaagccagagattcaggctgctgggttcaaatcccacctcaccccttactgattatctgtactaattaaagaatgttaggcaacttattaatgtctccaggcttatacatttcttctataaaacctggataataaagggttgtgaaaattaaatctgtctaaaggatttttttttaaaaaagaaaaagatggattattttctgctgccctaaatttgcttacttttttgtcacaactggaagaggagagaagagaagggtggcagtgtagcatggcatgaaacaatttaaataatatattaaaccatagtatttgactttttgaaaatgtgttccatagctctcattataattctagccataactgtaagatttttactgtacttcctaaatacaaagtgcttatgaattttagctggaggagagcaggagtgttcagaagcaaatgaagatcctgcagaagaagcaagcccagattgtgaaagagaaagttcacttgcagagtgaacatagcaaggctatcttggcaagaagcaagctagaatctctttgcagagaacttcagcgtcacaataagacgttaaaggttagttgcttcatttgtctgtttttttcaggagggacttatctgatttcataatcaaccctgtgcctatctgaaataaatccttgtctctacttggagacagatactgccttgctttttattttgcttggcctgatgccttgtgtgaggtcattgtaaatgtaagaccaattctttctacgtaagttttggtttcctgttcaaggaagagcaccttagttgcctcatacttggctcccgggaatctacgctcaaggccctcctgcttagagccatggcttaggaagctcagaattgccagttttctgctgagcactgatacagctgatcaccaagtaggaaaagctgcagtgaaatgagaaactagtaacagacagtctgggaagggagaactgctgagctcctgggtggagcattgcccagttccactggcccacccccagccattcagttgctaagtacttttaggaaaccacttataccttggctgattgtaaaggaagagggaataggtatccaaagattcattgatatcaacaggggaagaaggaaaggagcagagccgtgggaaggaatctgcctcttagaatgggacagactccctttatgccctttatgccccaataaactccctttatgccccaacaaactcccaaggccctagactataagtgcactcttgaaatggatcttcacctggtatgggagccattattaccttctttgcttttgagcccttggatttagatgtcaaagtaagtggtattttttttttcccataggaaatcaatattttgagtaggctggtaacagttcagacatgtaaaggtcttttgacactcatatcctagcaagaat

SEQ ID NO: 70549 - DNA, 895 bp, Homo sapiens
atataattctatgcatatccagccagccagccagccttattttacttggcatccttcccttaaaaatgggggatttaaaaacatagcgttgggttggggagaagtacagtagtgcctggcactttgttagcattcagtagatgttagtcatgactattattagatctcacatagtggtggagaccgtgcgccctgggttaatgtcccagttgcatcatagaacgtgtgactatggacaaattgttaaacctttctgttccttcactgttaaaattggtaacaaaaacctgcccttcatgaaatagagtatttcagacagtgcttggcacattaacatgtactcagttaccatgtggctgattggtgctcaaattaccacctccaggtatttttagacctggtaatctggagaattccatgagcagcagattcgttctgcctgccagtcctttcagttgaggctgcaattgagggggcgctgttaggcacagtgcaggtgatagctggacgccagcacagactcactgttgaggtggaacagagagttcccgcctcctggatctgccatccttctggtcctctgggactggaacacattcctctctgtccgtggctgcagagatcaccatgggtcagcagtcaacctaggtcttccaccagctcttcccatggcctttgtcccggtttgccttgtgttacagttttgtgggtaattacccaaggcacagggcactggctctgtcttatccttgtttcccttaacaccacctggctcaatgccccgacctggatcagagctggtgtgcagtcaacagtagatgaaggcatattgagaaagtagctagctacaggcatggataaatgcatcctgaatttctgaaaattgtgttctggt

SEQ ID NO: 70550 - DNA, 1731 bp, Homo sapiens
cccggctccggaagtgctcggagccctcggcgcggcggtcccgtcccgcgcaggcccctcgaggcgcgcgcccagtctcgcgcccggccccgccccctgctccgcacgccaattcgcgcctttcgccggcgcgtgccgcggcctcgcgcgcccgccgccccccgcggccccggcgcgcgccgccccgcagggcctcttactctctttactcgccatcttgcgtcgggtcgttcgcccctcgccgccgcctcggactcctctcgttagccaagagcagcccgaccgctggcgctcctgcctttcccaagcgcgtcacactccccactgtcgaaagcccgggccccgtcttgctgcctgggtgctccccagacgccgcgtccttctttcctgcctcctccccgctcgcgggtaccgaggtctgaggcgctcttctctctctctccaaacttggaacgagacttttcaacccgcgcctcccagcccgcccaggcagctgagcgcaggcgcatccgccctgggaaaagtgagaggaggcggagaggcgggtctgggagccaacggctccggcgccgagaccaatgacgcgcggcgggcgggtttcacgcggcgttcggaggcgggcttctgggggtgggcggagcgtgccgcggcaggaagttggcgatgcgcaggcgcgagggctcgcccggcgctcccagggccggccgcggaggcggatggggcgcgcgggggcggggcggatgagggcccgagggggcggggcggatgggggcgcgcgagggcggggctgatggaggcgcggctggccggctgagtgggggccgcgagccccggggcggcgagccttggggcccgcggggcgtggttgcttgtagcggcagcggtggtgggggtgagaggggggcagggaggctgccgccgcttagccaagcaaaatctcagagcaagaggggaaaatggttcctgttctcgagagattactgtgccttcaaagtctccctgataatcacggacatgcaattctctgcacccctgaaatgttctcctccagccgactggcctttcctggggcccggtcgggccgaggtggggctggtctcagacggaggagagcttttggagaggccgcgggcgttttctgcctgcaaaagccgccgggccgccctgttaggctaaatgtgcagcctgtggcggcacaggccgccggcgggccgaagccgatttacactgttacattttaatttgttcgatgtttgggtccttaagatgatggtttgcggcctcttcgcgcttcaggggattttgtccctgcactggcgttcctttctcatcccagccccggcccctgctgagtcatttttgtcacctgcaggggtcccagcgcgaccccaccccaagctggcggagctggagagagcagggctgaactaccctgggcctgcttacctgagccctgctctgctcaggaacttcatagcccctgaggagtgtgtcgggggaggagaaagctggctgcaaggccaaaagggaaatagaagaaaatgagggccaggagcagaggggacggagttgggggaggcgaccaaggtgcctgcgtgcaaagggaaccgaagtgtacgtccagctccgggagaggctcctcttgcaaaagcacccccggaacatttgctgccttgatacctttccaagtgccttcatgctcagatgctatcttgcagatgccgctgtcat

SEQ ID NO: 70551 - DNA, 1006 bp, Homo sapiens
aggaagcggccgcgcggcagctgcggggcgtgggggtggtggtggcggcggcggtggtggcggcggcggcggcggcggcagctgaggccgaggaggcggtggctgtggcggacgcagcagcaccccagctagggacagggctccgccgcgcccccttgctggccccatggaggcggcagcggcggcggcggcggcggcagcggcagcggcagcggcgggcgggggctgtggctccgggccgccgccgctgctgctgagcgagggcgagcagcagtgctactccgagctcttcgcgcgctgtgccggcgccgcgggcgggggccccgggtctgggccccccgaggccgccagagtcgcccccggcacggccactgcggccgccggccccgtggctgacctgtttcgggcatcgcagctgcccgccgagacgctgcaccaggtgggtccctccgcctcctgtccctgcgggtctgtggggcagtgtgtgcgggggcggaggttgcgagtggggcgacagggctgcccccagggacccggaggcctcggccagttctgagagagaggactctgcagccggggatggcggcgacgcccttgtccccgggggacaccagcctccttcgcagctcagctcctcgcccagtgctgggtgcgctctccccatcttccttccctgagacagtctgacactctctcccctcccccggccatttctggggttctgcagccgcccagacccaaagtttgtcctgttctggaagtggtgtttgttttggctgctgcctggtttaacctctgctcgctgctcctgcccctccctctcctgagtgggttctcagggtgccttgctgggatttcaacttgaagggtgtgtgtgtccgtagggttcgaggcccagggctgaatgttgtcctctctatgtagttgtaatatataagtatctactatatgtaattgcccataacatatttctaaatattaatattaaatcgaaaaccttaatgac

SEQ ID NO: 70552 - DNA, 739 bp, Homo sapiens
gctacagaaaagtaacatttgagttcaatctaggtggggaggaggatgttgttccaggtgatgggatggaaactgacaattattacaatgtcttgaaaaatgtgtatatacaacttttttgttcctctgaactgagcacccaagatgtaatttccaagattaggaaattgttttgcctgaggactttataaaaataattaattcacttttaatttagataaactagaataatccatgagtagtggtaatgactaatctgttctcttttcaccccagtgactttctagactttgaacattagaatccactccctgaaaaagtcactctcctttgtaactagagcaacagctatcctttgtcacctttatttttctctttggaagaggaggaataatcagtggctcacttctgaaacatcatgaataggtagaatttagtaatctgaattaaaaacctccctgtaaactgaaggaagaggaaattgaccagtgggcacacagaggttctcaagggacttttttggttagccactaggtgaaatccttgatatttcatcatgtaccttgtctcattttcctgttgtgaaattgggtgttcagcattgtttttcttgtctgttctcagatcacagaactgtgtggtgcaaagcgggttggttattttggtccaacacagttttacattgccctgaaattaattgctgcagcacaatctggcctcccggtacggatagagagta

SEQ ID NO: 70553 - DNA, 1489 bp, Homo sapiens
gatgtgtgtctgccacagtggcctctgtgagtccggagaaagagcagacctggcagtttcgcattccgtgaaggtcttcacgtggctatggtattcttgggagagaaagcaattctagacacatatgtagcacatgtgtctggagccttgcccacacttgttatggatcaagaattaggaaattctctaccaagaggataaaaatgcttcactcccatgcagcctgctgagtgtgtggctggggtcttactctctgcatcattggtaatttgtgaacaagatagatcgctgtctgtcatttcctcagatgcctgtgtggtcttctatgaaagatcttggagattaaggcctagccagaaccttctcctgcattttacacttatggagaagatcctgtgtcctgtaggatttaatgctgaggggactctgaatctgactgatggttgggtggttggtggagggtcctagggcaagggctccttcaggtgggctgctctgggcttctggggatgggatgttcttgagcccgcagttgtgtagtggggctggaggtgggggaggcccagaggggccctgtctgctcccttggcttcctgtgaagtagaagataccctcctaaggaacctaaggaatagaagatgggaggcatgcctttgctttagtgaaggtgataggatacggtgctgtcccaagtgttattttgggagcagcaagggcctttccactgactcatgcaggcaagctataaatacaatgatttcctggaactttttctccatctatgtgcattttaaatcaggccagcctcagatgctagtgatttgcagattattatcttttctgctaaagcaagaaaagactttccttggctcacacattagcatgacctctgtgtctgggcagagctcagcatgttttatttgttctaataaagtattctcctcacagtaaagttatagattgttttttaatatactaaaatctggaactctctatcaaatttaattctgtgccatgagttcatcagacaaaaatttgccttgaatttcctctcatactttgatctgaattctggcataaatttcatagtgactggtatgtagggtgggagtaaccacaggtgatgatgctataaaaatttcacatggctggcggattatgacctggaagattttcctatggatgcgagaaaattaaaacaatctgggaagctatctcagtacctttaccttgcaagaagggaggctggaaatgctcacaggtctctctcaggttgtgtgacccagtaaggagatgccagctgtactggagaattcacatgctgtggtttttacgacactgcatcacatagtggaagagacaaaactgggtttggagctcagctcagctgcttattcactgtttgattttcagcaagtagcttaatgtttatgcatctcagattcctaatctgtacagtagagccaatactccatggagttgtaaggtt

SEQ ID NO: 70554 - DNA, 824 bp, Homo sapiens
ggatcagggaccatgacttagtccactttgtactcccaattctatagtcagaataggctaatttctgtaataaagaaccccaaaagtctcagtatctgaagacaacagaagttttatgtcttacccacatggaattcaatgtgggtgttcagtagataaccttctacactgttattcggcaattaggcccctttcattttgtagttttcttatctcctagggctgtcctctctttccaagcctgcatctgacagacagatggaagaagagggaatggagaattgtataggaaggtttttaatgggctctgcctggaagttgggtactaaacccccactcatattccattggctggaactcagccatatgactgcatatacctgcaggagctgctggaaaatgtcatctagccatgagcaggcttggtgagcaagtagtgggtctctgcatgccaccagttagtgcctgcctggaatgtggtaggagctgagtgaatatttgttgaatgagtgaactttggattctaggtttcatcttgattcttaggtgattcagtttaatcatcaggagggacatgtgatgactaatcacagtggatttcagggctctgggcaccttggaagggttacggataatgatagagagaagagtagtgctgcctaagagtccagctcccagtgaggtgctttccttcaaatccaacagggaaagagatttttaaaaattaatcttgaattttcattttttggagaggacaaaggaggaggtaacagagaagaggagtgaggactgcttcctggattttgtagactgtgacagtgtca

SEQ ID NO: 70555 - DNA, 1734 bp, Homo sapiens
gactgtgtctccttcccaagatgagcagcctcgatataagtatgtaagactatatgccactagatgatgtcacatagcctttattacaatagcaaaattctatgccaggtactgttctaagtgctttgcatacattaactcatgtagtccccatattatacccattttacagatggggaaaccgaagcacaaagcggttacttggcttgcctaaggccataggaggactgtgttggagctgggggtccaatccagtaaatctgccttcaaggtctgcgttagttccccagtccaacttgtgggtgctggagactggaaatatcttgcccgccccccaccctggcccccctcgcccttcctaccagacctggctcagggcaactgctaaggccccgcccctctcctcattccaagtcaatcactggcgtgcgtccaggaaacccagtttacgacgacgtctctggtgcgtcacagagcgcgggggaggggcgggatcacattaaaaaaaaaaaaaagcttcggacaccccaacaacgaaggggggacaccacgtccctaactacaacgccactagaagggttgcgcatgcgcgccagcctcctgcgcagccgcagaaaccactcagcgcgcgagtctctgaaaggcctaacgtccattttcaatcctgcgggtcttgcgaaggaaaacctgaggtaagaggccccgccccacagccatctcctcagcaaattcccgccctcggccccgccccacagctatctcctcagcaaattcccgccctcggccccgccccacagccatctccttagcaaattcccgccctcacccaaggactgggagagcacccgcggattggccgatcaacggtgacgcctgtcagtggccagactccgattggtcagcgggtagtcccgccccccccccccccccccccccccccaaccgcgagtgtgggaattcggcgtcgcgggagctctctgatccactcaggggtcagggcatcactggtctcgcgtgcgcgtgaccaggcccggtttccggtgccaggacctttccgaagcgtcgagtggcctaacggtcacagctgtcgcccatcggagaggcaggactactgcgagcagttttaccgcgacctccggaggccggcgtgacaggctctgtcactaaaataggtctgtccagtcgtactttttcctcaccttgaactttccgtcacgggaatacacgatttggcttaggggccggggctctcctgaggagagagggtttgctttgcggggaagagcgagtcttgacttcgcagcctccaatttcagccgcggtgtggaggggggtgctttgggtggtccccacagcctttccggagtgcccgcgcgtgtaagcttttgagatttgacaatttgtgaagtgcttggtgctgactttcggggacgacaggatccttttacagtcattctcctgtcaggggaggcaggtggggagcgaggaaggatccagatttcgttaacagagctttgagtttaaagaattgacaaactcccgagttgatttcctgtcagaccttttgcggttgagacatagagtctgaggctttgatggtaaccgcgtttgatttagagacagactgtgcagcttcgctgttttattgtaaatacgtaaatgaggaggaagagaaaaacgtagggtgttgggagcagaggcgggaggcgggagatcctgcgaaatcggagtccc

SEQ ID NO: 70556 - DNA, 580 bp, Homo sapiens
gaatcagctcaaaaggggtgtgactcaagatcttataaaaaaaacaagacacacgagggggccagagatgactatctttccaaaagcaaaacgttcaagagatggtcagcatagctaatgtgttcctttgctaaaatataactggggccctccagaaagttctttgaatcatatttgtgctggctggaatgcaagatgttcctgggatgagtcacagagggagtttcttttctggtgatcttgtgttccaactcggggaccaaaaatcaataaataaacactacttcacttcatcagctgcatgctgcctaataataataataataataataataataacctcgacccgagaagtacagacaatgcaggaaagagagggtgaagagtactcatcttttagacagggaagcttctttctggaattctgttttgtcaaaagcagaacaacatcctccgcagaatcttagggttggtgaggcttttgaagtccctaaaaactcactgtatgtgtcctaaagcaagtatcatggttggagctaatatagcataaacaatacgaagttggggtgggggaaggaaa

SEQ ID NO: 70557 - DNA, 616 bp, Homo sapiens
ttaaagacaccttctttaacatatattgttgactcattagcattaaattcatagctaacagctatcactcctgtccggacaaagcttatctaacgcacgtgtttccaccataaggcatatcacagccttcttggcttagggatactagacagcacttcagacactagataacactttagcactaggcgtggggggccattttaaacagtgaatcatcaacaaaagagcccataaaaatgcaaaaaatgtggcactaaatagactgtgagaaggacacttgtttacagtttgagagctgaaacaagaagacagagtgtcatctcgtttgacctcagctgagaatgtgcacattgggcaattcaactttttaactgctctgtgcatgtgcatgctcactaacggtattgattttggggttccagataaattttagcaagtaggcaaattcacaactaaagaatctgtgaatagtaaggatcaactgtatattacttgttaaaagcctatgaatatgttccatgatagcctatgaatatgttccatgatagcctaagttctctccataaccctttatagatctctcattcttaaatttgcctaattctttaaagtttct

SEQ ID NO: 70558 - DNA, 656 bp, Homo sapiens
aactcataatgcatccttctggagaatgcgaggaatacagcttcagtgtgactgtgaagcaaataaaatggttaaacacctaaacgttttgtaaaaactagacttcgacttcccatagacttgccttaaatgtttagaagatttttcaaatcacaaaaatagcatggctctcattccaaagagctcaccgtctaatgtactcaaaaattttaaaaagaattgtctctccattccctgtttcttgtcccctttatatttattgattgccttgaatctcactgcctctgtagttagcctgccagagtacaatacctgtgtttggtgttgtttttgcagctctagcttaagccaattaattgcacaatccagggagggtgcagaagaagctgcgtcaccaacaaccagcaggtctgcaaatagcataggcagctggaaaggaaagggcaatctttaaatgtaaacaaaggaataggctggggctcattgagtggccttttcactacacctgcataagcggatagtgactgacatcagttacagcagcttgattctgaaggatgagcgagagaattttgcaaactcagaaagaaaagaaagcccaagccactacccacagagcccaaggtgcgagcgcctgtgaattatgttatcagctg

SEQ ID NO: 70559 - DNA, 977 bp, Homo sapiens
attgcaaatcattattcagcaaagaagtttctgaaaagctcaccctgctgcattcgaagtaaaatcatattgaaaaatgacataactcagattttccaatagttgaaatggggttttctgtttattattctgtattaatattctagttatttcccttaaggaagtaaaacactaagtgttcttgacacttgtctatggagtatcagagttccttgatattaaatgtcggcccttctcccttacaataggacccacctgcaagatttagaatgttaggaaataggaaagctcaactgtcccacattcttaacataagtgtatcccagtgattcaaccagggtcagttttgctcccccatacacatttggcaatgtctcaagacattttggttgtctcaattgggtgctgctggcatctatgggtgggagccagggatgctgctgagcattctacagtgttcggaacaattccacaacaaagagtcatccagctccaaaggtcaatagtgccaaggttgagtaaccctggtatctcccttccacccaaaagtgttcatatcagttcagccctatgttgaattagaatgtgtctctctgtgccaaataaaacatttaactgtggttgcccaaatgtgtctttttttttttttttcactaagatgtccagtttccttatgcagagggaaaggtagctactgatattcctcttgtttgctttcgcacagagccaaactaaagactagctcaggtagctcaatgctggatttttccagagcatagagaaaggtttcaggagctccccagtgtctcagctatgctcacctagtgtactgcacgttggcctaataaaagcaggcaggggcatgaactgcccactactgcatatatctgaggatggcctccctttgaagctttatgacctagttgctcagaaaaaagagtggaatgtgtgcgtgtttgtttctttgtgttgttgtt

SEQ ID NO: 70560 - DNA, 1286 bp, Homo sapiens
gcccctcctcgcctccccgccagccccggacgggacgcgcattccggtcccgctgcaccgctagggtgagccaccggcgcccccagcccccgccaggagcccggcggcgcgcaccttggcaccaggatttgcgcccgcacgccgccacaggcgcatccttccgggccgacgtttccctcccaaactccaaaagttatctcagcccagaccaggcaaagtctacctccttcctccgccccgccacccaccgtgatgccccccaggccccagcccggccctacccacggcagggaggatgcgccggagggcgctgtcggcgctgcaggcgaggggacgggtggaagctatcggccgggcgcccaaaccccgcggcggcgaaaaggccccggggcggcgtgaggggaaacgcgagatcggctgaagggcgtccgcggaaggcgccgggggcgggataccctatcgcgaagccgaactgagatgggacataggcgggatcgtaagggggcgttcctcgcacgggacgcgcgctgatggcttctacccgcccgcccacggacaacggtcggggtccgggacacacctccgcctctccattccttacggggcccggaatcaccacgtacctccagtctcgtcggtgaaaacaacgaaattctgtcccaccgatcgcgcgagccggcaccgagcttcacaccgccgccgccatgtttgagaagccgcgcgcggagccgcgcatgccccgcaaccgccactgccgccccgccccccgcgcggccggcccgcgtgccctgcggttgccgcgagcacgccctttgaccgccgccgcgtgcggggcccgagccggggtcaagccgagcgccaccgcaggcagtggcggaccatgagacactgtgagcccgggaaagcccttggcactttgcctcctaccccccacgcctacgccaaatgaaaaaccagtcgcagcccaagcacccgaggccgtggggagcccctcgatgggaccccgggttccacgtcaagttccatcccgggaactcgctccccttcactgtcgccttcgaatcctggccaccacccaccctggccacgcacccaaaaagcaggcgcttccctcggaactcaagcaagttcgaggagcagggagaagcagctggttacagcagcttgaggaaagccactgcttggcgggttgcagcatagtccttgaaactgctttttttttttttttccatgagtttttgccacgcattcacctcccagcttcactctctggatttcgttcttcc

SEQ ID NO: 70561 - DNA, 1444 bp, Homo sapiens
tttcgtgctctgcacatcagagtttaatgaaaaatagaacttttaatcagagtcataatcatgaccgacctttaataattcacctgcagtcaaagcgctgctgtattgcctgccacattttagttggaggttgggtggccggcccttgctggcttgcaggcaaagggcagccaggtgcattccccgagcgcccgattttccgaggcgtactgggaggagaggtggggtagggcccggccggatcgggggcgccggatcgggtctaggacttcgcccggcccctgccctccactacttctcatgtcggactatggcggcagtgaccttgtgggataggagagggtatctgtcatttcacttctgcgagaaaaacatgccaaaaaattaaaaagaaaaaaaggacaaagaaaaacacttcgttgtcgctttttggttttttttgtttgtttaacccaaacccttttttttttttaacccaaacaacgaaaccctataaaagcaaaaacagccgccttacggctatggttccactggggctcgaacccaggaccttctgcgtgtaaagcagacgtgataaccactacactatggaacctctacgaggaagaatattgttgggactttattcatagactcacagcagttccggtccctccgccggagccccgcctctccaccgtgaccccgcccccgaggcgaggagtttgcggcggcttcgagtctcgggctccggcgtttgggcggcttgtcttccctgcccgccacagtcgcggcccctgggaccagggcgaggccggaaccccggccgagagcacctccctgctatcatctgtccccaaactttccctcaatcgaggcgccggcggggcggcccggcggccggaagtgcaccctgctcgggctttgcgcccccggcagcttcctccgcccgcgagggccccgcgccttcccattttcccaaccggcaaactgagcctcggccacccggcccacttgccggtcggaagtcaggacgtcgccgcttgcggcggcgtggaaggcttcgcctccggagcaaggaggacgggccgctggttagcgggccctttgcccgagggtgtggacctctacccgctcccctgccccttcccgcagccttcttcccctcccgaggacaggcctagggggtgcaaatgccagggcttccgttaggtctccttagtctagggctgcaggggttgggggacgaagacgtgtagacggggccacccgtctatggcttccagggtggcagcggccctggccacgtgattgaggggcccagtgcaaaatgaagatgccaggccccttgttaagtttttgagaatttcacacggtaacagcagagtattcaacctggtgcggggtccctgacttgcttgcaggactgtagtctgggtaacgggctgggaccctccatcacaaa

SEQ ID NO: 70562 - DNA, 552 bp, Homo sapiens
aagtgctgggattacaggcgtgagccaccgcgcccagcctacctaaggcttttgaaaccatgtttggagaaaaagtgttcattagttcgaaaaaggggataaagaataccaacaggccaagcaatgagtcacttatttctagataagcggtgcaaagggccctctgccactgggttaccttgttaggcgggacagcgtagagttcaggcaccaggcggatcccattcttgcctctgatgagtattccctccagggcctctcggtattcttggacctggaaaacagccccatcatccatggcaggaaggaggtctggtcatgattgctgtaacagcggtgcaacatagaaaaaaagctctcatggcaacagattagagttcagacacagggcaaagaaatgcacaaataccctcagctccaggagtgcaggaggcacacttacagtgttaggaggagctaaacacgatcggctattcctctcaggagtgtatctaagctcagccctgcctgtcttgcttccagaaagagagacagagcacccatcatacagta

SEQ ID NO: 70563 - DNA, 1080 bp, Homo sapiens
gtcttatttctttttctcagtctctcgtcccactcgacgagaaatacccacaggtgtggaggggcaggccgccccttcaaatggtgattagcttggcatatttaacacaaaatgatttctaacaaatgaaaccaatgtaaattgatctcaatttaaaaagcaaatcagaaacagagtttagaacttgttaccagctgacactaaaaaaaatgcctcctaaacatctgcacaaagctacagcaggtggggagatacaacatacactttagaaaccgttcgtgcagctcattcttttttttttaattgtggtaaaatatacataacataaaagtgctcattcgtttttctagagtagttaggggacctgcctaagattactcagagaaggtgatgaggccttgaatgggttagggctctacaactgtgaacactagttgtgggggtgaatgggtgcaatcctgcacttgtgggcgcatggcatttcccggcagaactgtgctgggagtatcctggttagccagaagagcttgatgacacaggaagggaaaaagagggcaaacatgagggctactcaccaactacccccaaaataaatacaactaaaggctcacacaacttttttttaatcattaaaatgttggggaggaaagtccaatctcacagatttgctttaatgagaagacaattcttttgcttctgagggaaggcaagcctggatagctgggttattaggatgactcaggtcctgctggaagtcttctaccaacaaagacttaagggtacctttcatgcctttggccactgcttgatgcaaaggaaggaaactgatgaggtatctgtacttaggatctcttggcatcaatggggagacatatttatgctcaaggaatgcggagctgtagcaggaccttcaggaaagggcgcaccatgagccagagtactcctgcaaggaccacgaggcctgggcacaaacgtgtggcctctatcaaaatcataacaccaccaagagcacccattatttactgttgcccagtaggtgccagacaagatagtaggcactaattttttccttagaaacac

SEQ ID NO: 70564 - DNA, 2016 bp, Homo sapiens
ttaaggagcacggggtggcaatggggtggtaatcactggctagcaaggactagattcaaatagcaaactcttaattgcaaggtctcaggtcacaagagggccagacctgggaaggagaatgagttacatgagagggtagttccacgcgttccctgggggcggtccctccttacctggtaacacaggatggtttgctgcaccagccgcgcgtacccgtccaagcggaccccggaattgctcctgctccgcatctccccgaggctcccaggccgcagcgcccgatctgccgcgtgggcgcgggacgtcggggctgtggcctccaagcgggtctggttcccggacactcacagccttagtcggttcttgggatgggaccgggccggaggaggtcgagacttttctaaacgctagccccaaagtccggttggaaagcaagccaaccagagctccgcgcggcggggaggcgcgggggcggggacgggggctggagcgacgaaggtcccgcctcggccaggcctgctgggctcccgacgctcgcgggagcagcgggaaaccaggttccgggagtggggcgaggacgcccctgccaagccccttttacgtcccggcggtcgcgaggaggtcccccgggcgcgaagaagacgccagcccaccccagccgccggggagatcgcccaggccgcgctcagccccgcccctggctctgcccccgccgcggagcggaaccctccaagtcgcggcctgaggaggaaggaaaagggggcggcccgggagagccgctgcgaaatcagcaacgggcgggaaccaggttgcctccctgagtcccttctctccccggccggctgccaaccacagccaaggccagagaaacaggcccttctgccgcggccacctgggcgccttggacccgccctccggactcgcccccgcccctgccgcggagtggaacgtttggaaccctgaggggcacaggtaagggggcggccccgccccgcgccctggaacgacctcacggccccgcccacatccccgcccctggccccacctccgccgcagagcggaaccctcagagtcgcggcctcgggggggacgaaaaaggaggcggcccgtgggagtctaggggaacccggcttcgggcggcggacgagttggctttcctgcgtggtagtgtggagccccccgagacgggtgccagtcccactcgaggccggagaaagagggccgcctaccgcggccgcctgggcacccctctgagggccaagattgtagtcccacctctggccccgtctccgccgcctagcggaactggagtagcgggacccagcccggaagaaaaagggggaaggcccggagaggtgccccagcgacacctctggcgcctgtgaccccgcccctagccacttgggcgccgcttcctcgggcaggttcgcagttcatctcccacgggtctacagcttgaaacttggcattcattataatgtttcgtggctgctgataacctacagttcacaatcttcggcctggtattcattgtccaccaaaatctggcccacataggaatttactggacagctagactaatgcaatcaatttccgcaagctcttttccagtctccatgcatttactctatgcttgaccccttcggcccttcttcctcctccttgactaactgaagcctatctttcccttaacggccagctcagctcctctattagccttccccattttctgaatttctgtagccattggtttagtaagagcttaggacttagagtcagttcattttgagttcaaatgtcagttctgtcatttacaagtcgtatgacctttggcatcccgttttacatgtttgaacttaagtgttctcatctgtaaaatggagataatcatagcacctacctcacaggatgacttaagatcaagaggatgaatataaagcatttagcacaagcctggctagtagaaaaatacttaataaatcatagctaatttcgttgtcacttggccacaatgta

SEQ ID NO: 70565 - DNA, 619 bp, Homo sapiens
gccagcctcctgagactttgtctccttgtaagtaaaatgttttgagtccatcaggtgaaagacatcaagttcaaaatgttattatacaatttaagaatgtctaaagactcattcttgagctttgctaactcgtagggcaggacctaagtggtgtacaagatatgatcaaaggcaaattcgtgtactcagtgactcagtgtacatacacagtgagtgactactatgtgctgtaactgagacctctgatcaaaataaactatgccttttcactacaggcaggatctactcaacttccaaatgcaggtaggaaaggccagaatgaaagatgaccccagcaatcatcttgaaaaaaatatatagatcaagaacttaatgcagactgctttcagttgtcagatctggaatacgtttcctcaaggctgaacatatgtttttggagaagttttatggtatttgaaataatgtagctcctactgccttctgcataaaccgagaatgtcctattaggtcataaagtctctaggatcactaatcaaagggcaatctgtgaagtttgaaacctttagtcattgcacatcaaagccatttttctctttttcagctggaacattgatatagt

SEQ ID NO: 70566 - DNA, 394 bp, Homo sapiens
cgcttcagtgacaaaacatagtgactaccaatgtttggggttcttacatcattgaagggaaagggcaagtcacaaaaggaaccatatcaacttatgtaagacatggcacggaacagagaaatttcgcagagaagaacagcaaactcaccacttgctaggattcatgaaacctcccacagttgcagattgccccaaaccatgacatcagggaggctgggaagccacccaacttcctctatttatcaagctggctaaaacccagggtaataccagcgtgacccaaaaaaataaattttaaaaaaggcaggcagactttacaagtggtttgggtgggaaggaaatgacctccgggtgtacttaagagccctgctccagttcagggccgctcacaggg

SEQ ID NO: 70567 - DNA, 829 bp, Homo sapiens
aaatgcagccctagaagggcctgcgaagtgaagagttggaaatacttggtgaacagcaccgatgactaccacacctactacatgccagacccggggcagatgaagatgggcaagatgcagtcccagccctatagtcccccctcacaatcaaaccagagaagtctctggtgatgcaattctacctccatggtataggctttggtggatctaggtgagaaaccaatcactgccaacttgagtgaagtcactgtgtgatacagcattttttttctggaacattgtgttagttgcaatggtggtgaacctattgcacaacggatgagataaataaatcacacactgtctcgtgggaggcaaaaaggccctctcttgggaaaacactgaatgaagacagttggacatgttgtcattctcttcaatgaaagttacaaatggcagtttaatgaaaaatgaaaccagaccttggcctcaaccaagatgaggaaggtgggaccagccctttttgagaatgtgttccaagttaggaagagctggtggccctgtgccaacacaaataacccgaaaatccggaggaaactaaaggcagcacagtcaatctgcacgctgggattagtttgtgaaactcaccaccaccctgcctggcagtgagtgagcccagggcttgggggttggagtagggagttgagggaggagggcaagcacatgtggctctttagtagtgagaagagacaactctcagggccaggtcacatctagctcagtccaaatttgaacagcaatggccctttttgtttcttggaggagtccatgaactcctggccgtgcgatt

SEQ ID NO: 70568 - DNA, 1309 bp, Homo sapiens
cagagctgcagcaccggcaggagtaggcgctcggtaggacggggcctgcacaacctccccggtagtcagcagagcggaatctaggaaggctcctttcccgcggcgccctggaggcgggggccccaccttcccacgcaggcgctatcaagccccgcctcctcacccgcccgcggcgtggcgtcggaaagagccctcagcccctccctctctggcgctgatacccaatgggcagcctcaggcctttagcgggggcggggcaccccctggacgccgttctggttggcccgcggcccggcgcagcgcatgacgttattacgactctgtcacgccgcggtgcgactgaggcgtggcgtctgctggggcacctgaaggagacttgggggcacccgcgtcgtgcctcctgggttgtgaggagtcgccgctgccgccactgcctgtgcttcatgaggaagatgctcgccgccgtctcccgcgtgctgtctggcgcttctcagaagccggtgagacctcccgggcgggccgggatggggcgcgagtggggctgaggcggggccggagggcagggcgggccaggccgggccacccagagcggggtggaaggcgccaggggagccggggagcctttacttcgcctccgcgccctgcattccgttcctggcctcgggagaagcggcacggaccgggatcacgccaaggtccgtgtgaacttcccccttctcgacacccacctcccgcccccgggcccagctgtgcgccaggcgaagtcggtgtgctcaagaggtgcctgttgggttacaggacacggaaagggtggcctcggcctccttcgagtctccaattgaccccactcatttcggatcttctaacttaatttctcttgaccgagaggctttgtaatagcgtagaatctggagacagggtggcttcgttcaaacagcaccctcaccattgactagccctgtgaccttgagcaagtttttaaacgtcccggggacccggtttcctaaaatgtttgctcgaagtggagttaatctctaaatggagataagagttatctctgaaatgttatcagttaactctaaaatggagataataagagtccccacctcttggggttgtcttgaggattcaacgagtgacacgtgtggaaacgattccaaatagcacctggcacataatcgataacatgtgtgttgaatagtgttatttattgagtctccagttcggtatacatttcttgaacacctgtgctcagttctgaggcgggttcacagaaggtcagcctcttcagaaacaaacttcctcctct

SEQ ID NO: 70569 - DNA, 381 bp, Homo sapiens
ccaaagagctcacggcctatcaagatccacgccaccgccttggcgccatgagaagcattccaggccctcacactaaaagctagaaaaaacgtttccccttcaggggaagtggggaaaggacgggcagtcacttagatctgtttagggcttggaatgaccagtgctgaaactatgagaagaaaggtaaacattaagcaacattcttctgacagctacaggtagcagaccaaactggagagcccttccatgtggcaaacacgaggtccatattaatgtggaagaacttctgcactaacttttaaagcaacagtgtgtcaccagaggaagagcagccgttgatccctctgttaaggaaaacttttgaatggaacccgtctgaag

SEQ ID NO: 70570 - DNA, 765 bp, Homo sapiens
cccttaaaaagccttctgatttatcttcttctcaacagagatttaaagaagcatattcccaaattaccattgtgctcacaaggatactaaacccaaaagaagatgattctaatgcatttacagtcatcaagttcctctggcttttcaactcttgacaaagaaaaaaaataaggatggcttatcactctagatcaggggtcagcaaatgaaagctcaccactcacttttgtaaagaaagtctcattagaacacaactatactcatgcatttaagtattttgtacagctgctttcatgctacaccagcggaactgagtagctgcaacagagatcaaagtctaaaatatctggccctttacagaaaaagttcgctgacccctgctctaggtagactcttaatcaaagctccattaagatctagatttctgaaatctgatggctaatataattatttcaaattgctttaataatttacataattgttttaaaaagcattattagaccaagataatagtgactcacaaagtataagtctgtatacaggaattccccccaaaggagtaaggattttctaggcttgtctgaatccataatcacagtaacttggggaaaagtgaaagcttaggggctgacccaaagcatggctgaatggcaggaagagctcaaagatgaggaatgcgctccttaaaaagagcccatgaggtaagaaatggggatgggctccccgctggaaggaacagagatgctaaattgggtagagggccat

SEQ ID NO: 70571 - DNA, 1058 bp, Homo sapiens
tgcctttatcctcctcactgtatcatttaactgtaacgatcactctgtggccaattgtgttttccaagatggctacagcaacatctcctgtcccttgagctcttctagaatgtgatccagctgtcaacaggagaaatctaatcttcctccccgggctttggaacctgggcaggctggtgaccactttgaccaacagagtggaggaaagtgatgctgtgtgacttctaggccatattatgcagtttccaactcacttgctggaataccccaagacagccatgctgtaaggaagccaatttgcactgagacacaccagctggcatgcctagttactgagtcatcccagcctggcccaacatgtgagggacccagccttcagatcgttccagcccccagctgtcatgtccactccaaacctcaggcctttccagccgaggccccagacactgtagagctgaaacaagccctccctaccacgccctgtacaaatgcttgacccacaaaactggtaagcataaaatggctttttgaaggtgctaaattttggagtaatttgtcacacagcaacaggaactggaatacgctctacaaggtgcctattattgttcctggtttaggaaagaatccaactcccagagagatcagataatattccagccgccagccagtctggactcaaagtccgtcttcttgcccctgttcctgctcatatttttttcaatcaataaagattttctgagacatatgttccagatactgtagctgcacagaaaaaaaaaaaaaaaaaaaaatccacgaacatacccaattgcacacatgaatataggcagtaggttcaaatatgaaaccaggccaaattaggcctgctgcccttctacattcttagctgacattttctcagacagaatggctctttgatccagtaagtacttactgacggtctgcggggacagggtcaccatgctggacaacaggcagatgagtcaggaatgcatgatcggagagaagtcagagaacaataaaaaaaagaaggaagggtatctttctctggcattgga

SEQ ID NO: 70572 - DNA, 2576 bp, Homo sapiens
ttcaggctttctgaacatcctgactagtgtactggaatcctattacctgaacacagaaaggtctcactttattatgatttattattatctgcagccttcctatgcctggcctaggaacatccaaaaataatctgccagaggctgaaaaacagaagctggctgtcagcaagaacattacctgggtagaccaaacatttaatagcccaagtaatcataagtgccttgccaataaagtggcagcttctctgggcagcaaggtggttccaatgctccggggtctaaatcaaatgggacccagggggttcaaaggttagttggctacttcgaactgatgtttactcagtaaatcaaagaccggatcaccatttccaggtcccagaccctgaagacttaaaggacagtatgggaagtggccttttagcatcacggagcagagagctcgccaggctggaggaaggcagcagcgaaagggtcggggccgggaggaaggggggcgcaaggagaggagcgtcaggtgctctggaccccgggactgcgagccagaccaggaactggggcgtttcccgccccaccccccaacccctgtcaacccccagcaaaggcaacccagccccctccaagaccccgaggttccagcttcccccgagacaggaccaggaagacaccagcagccccgcgcagggccggagcccaccaggtccgggtgcccgtgtccgcagcgcagaggagggcgcgctcgggtgcaaaaatggccaagacaaaactctccccgcccacccgaaaaaccaaccacaccccctgcatccctcagcccgagccgcccggggccagcccccgtgatcgtctgctcaggcccccgcgggttcccgtcggcgccgcgcgcgggctcggcgggcacacgggcgcaagtgggagtgaatgggggtgcgcgaggcaggcgagggcgcccaccgcggtgtcccccgtccggaccctgcccccggggcgccctcccgggctccgcggttctgggactggcgcgccgccctcaaggctgaagtggacgcccggacgcgggcggcccccactcacccattggcgtcgagccgggccgggccgccgaggcagcgtgaaagttggcggaggcgggcgtgggggttggggcgccgggatcggggcgctgggatccaggcgcgagggtccggacgcggcggcggctgggccggcttcttcctcagtggcggcggcggcggctcagcgccgcccgctgctgcctctgctgctgctgccgctgctgccccggggcgactcctgctgctgctgttgcatcgcggcccaatgcgcccggctgcgccgggtttcctgctccccgcgagtggaaattgcgaaaaaaaaaaaaaaaaaaaaaaaaaaaaaaaaaaaaaaaaaaaaaaaaacagcgccgcccagcccagcgcccggcagccgcggccgcgccgcccgctctcccctcctcctcagcgctgccgcgaggctcctgcagctccgcctgccggggacgcgcggccgccgggcgggggcggggccggagaggggcggggccggggccggggccgcgtcggggcaggcgccgggggcgtccctgcggctgaggggcttgggcgccctcctcaccgcccgcgccagaggcacccctctccgcgcggctgccacccacccgcagcggctgggctgacgccccgggaagtgccgcgagactcctcgagaccggaggagaggggcttcttgggggaggggcgtgggagtgcaggggcacgtggagaaggaggagaagggggctgagcgggagggggcgacaagaggtggaggacgggctggggatggagaccagggcaggcccggggccaaacgcctgaccagggtgatggcaggtggccctggggcatcgaggcaatctggaatgagttttcccggggggctgttggaggggaaggaaaagggtcccttggaagggagagaaacgcggcgtcccttcggtggggcgtgggaacgcaggcaggccaggtgcgagttccgcacagaggaggcggtggcactgacgtggggaaaaacgggcgaaggacgcagcggggccgaggggacgcatcgcctcgctgggacccgcctaagccccgccccagtgcctgggccaggtgcggttcgggtgttcaggaatgttcccgagctctgacgttcccaggaatccgctgagatgagggctggctccctccctagcaggcattattgtgccttactgactcccagacctggacggccgacccttgagtgggcgctaaaatgttaacagggaatccgtgggcattcgtgggcaattcagaagctccgttttgggtccattcaccaccacacctttcgccatagatactctgcctgccaccacattcctctaccggcccgttatttccttttccctttccaccatctggtggtaggaagcgatagtgaactacatgggagacatttaggcaaagagcacgtaagacaatagagaaattacatcagtggcccctggaaatggaggaggctgagggctagtggactcaaaagggacaaatgaa

SEQ ID NO: 70573 - DNA, 474 bp, Homo sapiens
actgaaaacaagttggaaaaaacaactgtatttctaatgaagaacatgaccatatcacaggggtaggagtggaggagactaatgcaagtaatttatgtacacagtatttgtccatataccttctgtctttggggcatggcactgaagaaccgcaaacaaatcctgaactatttttagtaggtttgtttcctgctgtggtataagtgaagcaattccgaaactactttagatgtattatgggattgagcaaatgattaaatcgtttgatgttgggagccagggttctcactgtggaggaagggacatacaaatatcaaacaggagaaggcaaggaagaatcctatggagatggatggtaggtgccagtgtgacctcatcatttctaaaatatgtatatatatgcatgtatgtgtgtgtgtgtgtttcctagatatggctgctgaaaatgcttataagcaaagacactccagtagc

SEQ ID NO: 70574 - DNA, 871 bp, Homo sapiens
agggtcgcggcagcaggtgcccgggtcgccgtgcctgtcgagggacctcaggggcgccgggcagctgtcccctggaaacccgcgccgggtcgccgcgcccaagggaaggcgctgaccgagggacctacggggcgcagaggagctgtcccaacagaacccgagtcggaccgccgcatcctccccgctgccccatccgccaccccgagaaccgcccctcctgggtggcggacacgccctccctgcgggcccaggcctcctcgccccgcctccccccgagccgctcacccggccgggaagcccccgccgccgccgccgccgccgccgccgccgccgccgccgccgccgccgccggcccctcgggcctcgcccctcactctgccgccgcctcccacagcagcgacaccccagccacctctgccgggccgcgggacccggaaccacttccttccggaaccgcctcgccccgcccccaccccggccccgcccactgctcgcggcctcgcactgggcccgttctccagccgacccctatcctctactctcccggcgagggtgccccgcccgggcttctcggaccagagcgctgcgccccctgccggccgttcccactgcggccgctctgtccagggcgcctgcgccctctgccacccgcccgccgggtccggctagagcgcctgcgccctctgccgccctctcgccggaaaggaggggacctaatgggcgttccaggtccagggatcctgggggttaaggcccagggattggaggtcacccctcagtcatgggcagaacttgatcccgtgggccttccagctttgtgcagatctctaaccattcacctaccctctatccatttcccactcctcaaatt

SEQ ID NO: 70575 - DNA, 860 bp, Homo sapiens
cacctagttccaacaagctgaacaatttcatccttccagaggaaggaaaatagggcttagcacacactcaaaagtcactaaagtgctctcagcccaacaggaatatacggtctctctaagacggccctggtggaaagggaaacattttaagaagcccagctgatgatgccatgtcctaatctcacttaggtttcatgacaatgtaaagatggagtattaggcacttccctactccctctttttaggtgaacatcagggttgaatctggtttcagcatatggcaatgaacatgctggctccttttaaaaaaattgtgacaaaacatatataacaccaaatttaccattttaaccatttttaagtgtacagttcagtggcgttcaactctccattcccctcccctcagcccctggcaatcacccttctacttcctgtctctgtgaatgtgcctcttccaggtgactcgtataaatggaatgacacagtatttgtccttttatgtctggcttattttacttagcaagtcttcaaggttccccatttctttttaaatgccaaggaacacagccaagagatggggatggggggtgttttttggagggtctcaggtttaaaagaatctctcttctcccaactgggcagatgcaaaaggtgaggacaagccacttggttaaaacacaggagctcgtcttatgtctgctgggaaagggtccgttacaggtacgccagcctaggctgggctcctggtgagtgctgcttgttcaggacaggggtaacagcttagcttgagatgcccagtttccctagaggtttgaacagggatgtgggcatttgtacagagttcctctaggaaggatata

SEQ ID NO: 70576 - DNA, 946 bp, Homo sapiens
aggccagggtggcctaggtgggggaggttctgacagcctcaagttggcatagccctgaacagccttgcttgttttaagagaatggtcacatgtaggttcagttcacgccacagactgcgaggttccattctaaataaaactggaccaattacccatgagcacacatttaaaaataacttctacctgagaagtaagggtggattctttgggataaagctcattaagaagtctgtttacagtccccgaccccagcccctgcccaataaacagagtaagttagaaaacacacacacttgtatgcacacacaaacatgaccttcaaattagaaaagtgtgggcaagtcatagattttttttttttttacagtgagtgaacaaaatacagaattaaaaaaaagaagttcccaatgttatctacaatctgtcaagtttcctgctcatcctgctttgccacttgcttacatggactttgtaccctgtcagctgccctgcaaaagtgctaagcacaggtatccggaagaaactaaaccacaaggctggtatgtcagactgcacggctctctggccagccctgctcacattgctgaaagccaaagaaagtctggcaagctatttttcaatttcctggaaataggtattttggctgatttaagaaatatgaattaattaggggaactcactgtgcttgtatggaggtttattctgaagtaccttctcatctatttaacaagggtctatttgattgccacagtaatccagtgaggtacgtaggaaattgctattaaccatattttacagaagaaaaccaaagtcctaagagtttaaacaacctttcccaaagaaatgcaaacagacaagagtaccagggctggcactcaaggcatttgttcattgtctcacttttttagctcttccactttaattttttaaggtccaataaaaatat

SEQ ID NO: 70577 - DNA, 748 bp, Homo sapiens
ggaccaaccatatggcataaaactccctcacctccaagaagggggagctgttctacttaatttaacatgcctccagcactaatgttctgtagagaaaaattataaacagaaattgcctcaaaagcagcccccagtgacaatgcatatgtcagagcatgggaagtgtcttatgtgacttcacagtaccccttcctggaagcagcagtgacaagctttcaaaatggagagatcatggaagaagaggacaagctctaagtcatcaaggaatggaggatgggaagaaaatgggtgagtccagcaactcttaacacagaagttaggaaaggagaaatctgtcccaagttaccaaaacagcctattatactgtggctttttcccatctactgactctgtttcataagcttttgtgggtagcaccctcttgaccttgctttagccaagctcagctgaagtaactaaacagaatgtaacattcctgaacgattactctgtgctaggtgctttgctgggcacttttacaaaagtcacctcttttaattcctgtaactacctctgttttgggctaaggagacagagttagaggggcatgtgacttgcccctggccaccagctgctcagtggtagagctggcattggagctgacatttgaactgggagcagatgaaggcacagcaatcagactgcagccaataacggtgaaccatagctaagacactggcttagacctcattttctaagaggaggaaag

SEQ ID NO: 70578 - DNA, 1580 bp, Homo sapiens
tacttgcacaattttcttcaagttatacggctattaaaaatgacaggaacactgtaaatctataaaagtaatttctttaggagtgttctgttttttgtttttgtttttttttttttaagattaggccttccgttttggaaatcccaaataaagttatcctcaagtctgatcatttgtgaacgcttagcctcagaatggaggacacttaaattaggtctttattctcacaacatatgcatcatctgaagcaaaagtagaaaacttggctcaatatggaataagtcttcagcaaacaaacataagctatatcctgtaaagggatggagagagtaaatctctagaggtgagccttagaaatgtatcaaggtttcacccactgttcacaagggacagcgagtagcctcaacaatactgaactgtccataaagaaacccatgcaggagtacctggtgctcacgaatgcagacagcactctgaaagttcagaacggcttccagggattataacccctcatgcccgggaaggccaaaggggcctatctactaaacctaggccgccccggggaaggttcccgccaccgtccccaccgagcagcggtcagtctggcgcgaatcaggagcaaaagcccacattctcccgcaggaggccctacaaaaatggcgccggctccaccccaatgtgaccaaactgggcaacaggagttaacttcccagctcctctcccgagctcagagtcgcgtgtggggcgcccagccgcgggcaggcagggcgggaaggaaaaagggtcactgcggcctgggtgacctgcaatctacgggcaggacctgggagacccggccgagcagagccgtggtccgggggtccgggcggcattacctttattcttgggcatggcggtggcggcgacctcgcggcgtctctgacttctttccgggtagcggcgaccgcggcggctgctgctccgaggggcgacacgagggagcgcgcgggaccaagtaggtgctggaggccaggcaacgtgcgcgggagaggctggcgacccagctcttcagagatccgcctgcgtccacgctcggcggcagcaaatggcgccgcgactctttgcgtcgcttttccccgcctcccgtcgccggctgggcccgcccccaggctttatgacgcaggcgtggccgactgactcctattgttagagccgagggagacgcgttgtgggagggtgcgcagcaagccagagaggacgcgaggggcagggcctcaagcagggaaaaggcggagtcagggagggagggggagagactctgcgtcatagaaaagggcgggttgaggtggcgcttgctgctggttaagaccagacctctgctgctttgtagcaaacgcgcgtctcccggtttcacaagtggctgactcgttaacctcgtggttagctcagtttttaaaaaatatgtatatttttatttttattttattttttgagacggagtcttgctctagagtcgcccaggctggagtgcagtggcgcgatctcggctcactgcaacctctgccgcccgggttcaagcgattctcctgcctcggcctccg

SEQ ID NO: 70579 - DNA, 1173 bp, Homo sapiens
gaaaagctgctttaaagaacatataaaacgaaataactaattactgtaattatagttagctccaactaaaacattttattctataaaagaagctgaacagagcttacctgtatagagcgaacacgaaaagacaaaaatttaaacatggctacgaaaccatgatggtgataaaagaatttctgacggtaaaacttaagttagaaagggaaggccaagcccctgcaaagttttctcctaccagctgttccggcaattagaaaatttcctgtcaggcgggtcctgaaaatgctagaaaaagaggccggacaattttcctgtggtaaaagaaagaagaaacctgccggcaggggcactaatgtagctggataggtagggaggccagaataggaaaccaaaacagatttgctgatagccaaatcctgttgaaatattcttttctcctagttcccagcaatccggacaattttcacaaccagtgaaacaaacgttattattttagaatcctgagaaatgccagaatttcttaactatatgaccctttaaaacaactgaaactagttgccactactaaaagttgctaaactgatgcacaagtggaatttgaccctttgcagtgtgtttatacacacactcaagccgtggtctcaagataattttaaggttatacacaggcatgtcatgggtgttccctgtcaatgaggaagagtttcataactataggtagaaaatgaagaccacaggcaagaaacttttaaaattgtgatgtaaggacaaatgctacctgtcttaaatgaaagtaaattacttttgaatttatgttagtcataagcattaattatcaaccaggttaaagacttaaaggcccatagttaaaaactcacattcctagttgataaaatataagttaaaaaaaagaagtccaatccttgggttattagcaaaatgaaacacttaagaagccatgttggaaaagaaggaggggtcaagctaccatataatcccttactccatttcatttcatcctctaatacgttatagaagtttttctaaggtatttttactttggaaaatgacaggtatgccaatattcagaacataatcactgtaatagtggtatttaaaacaaccgaaggacaacagcttcaagagttgtgggataatgctctgcttaat

SEQ ID NO: 70580 - DNA, 755 bp, Homo sapiens
tggtctgtcccatcctttgtacacattcacatttagaaataatttctagaagtagaactgtacattcaagagtatgcagcattaaggttttggatcctaacttatttggcacgttgtcctccaggaagaacctgaataataaggaaggaaccacatcaagaccttgggcaggggtaaactacagccaggcctggccagcctaagggccaaatctgcccatgtccatctctgtttaaatattatcttcaactgtgtttgcccacaatggctaccgccgagttgagtatttgcaagagagatcatatggcctacaaagtctaagatatttatttactatctggcccgttatagacaaagtttgctgactcatggggtagagtcctcaaacagaatgaacagcaaatgccaaagcacagagataggaattagcttaatgaattcaagacacaaaggaaaggccacagtggctaaaatgcaatgaacatcaaggaaagaggaaggaaatgaagaggtttagggccatattaagtgaggccttagacccaagaaatttgggtttggattttatttcaagtgtaatgggaagctaatcttgctcattttaggcaatgacattattacctatctcaaaaacctatgagtcctttctggtctttcctttcttatctaatttccttcctttcatatttaacccctcaataaattctactaattttatctcaaaaataaacctaaaatctgtctatttctatttc

SEQ ID NO: 70581 - DNA, 2611 bp, Homo sapiens
aattgttatacagcagcggaggtgactgggggaaaaagtgaaaagcgatttgaactgatcccccgccctctccattataccggagaatgcaagtgtcccgcatctcaagattaaactgagcctcggttttactgacgtaaccagtaaccctatctacttctcacactgcggaggccggcagggcagcggctgccgccaagcacaccactcatcagagcctgccccgttccacccccgcgtttcagtcatgctttccagaaatggggtcactcactcagtaactattacacacacgcagcctatcatcctgtaatcccctaaagtccgctgcggggagagaaggcagcaaaaagtcaagaaggaagaatcacagacgcgccaccatcaggaattgattttccactccggagaggagcggtgataccttggaacgggtcttgtctggattattttcgcagaccccgagttgttctgggataggggcggttcaggaaagctcggtgtagtgatgcgcccggggaaattctgttttgccctgtttgggtatattgtttgggttttgggcactaggatgggtgactcagggacggtcaccagatcccgggcgaggaaaaccagaaagccttttacggcggccgctgatctccttgaatatcaccctctcacctccatggacaggaaactcaagttaaactcacagggacgggggtctagctctgcgacctcagaaacggagggggtaggggaccttaggcttccgctttcttctttgcagcagcagaaaccgctgcggcagacgagggggaggcaaaaccctgcaccccctacccgaaacccccacaggtcgccgccgcccgtgccccgcgcgccggtctccccgcagcagcccctccctcggctggactcgagagtccctgctccccggtgaacccgatccctacccctccctcatctcccaaagtcgccaaggtccgggaaagcccccgacccggctgggccaaacttcccaactccccgccggcccccgctccgcctcccgcttcccccacgcaaagttgattaaaattggcttcttgcaaagccccagcgcccactccaaaccccacgcgccaccacactggcagccccccgagcgagggaaggaggtgagggtgaggatggaaggaacagacagaccggccaatagacccaccccaacaacccaaaccaaaaccctgagcccgggggaaagacgcgagcgggatcagaacgggccgagtggccagctccggggagcgaagcgagccggcgggggcgcgaggaggagatgcgccggccccggccgccctgctgcactcacctcagcgctgtcggacgggctctccacagccatcttctgccacgggtccgccagctgcgccagcggcatcttcccccccggcccgccgccttcaccgcctcctccctccccgcccgccccacggccggccccgctccgtcgccgcccgagccccacggcagcggcggcggcggcggcggcggcggcagcggcagcggcagcggcagcagcagcagcagcggcggcggccccagagagggctcgacgccgacgccgaccgcccgaaagccgcgcgcctggccagagacgcccgcgcgctgagcgagagcctcgcgcctccgctgggcaccgggtctcgcccctttcttcctctcctccttccgccgccgggactacggctccgccccccccgccggttcccgcgcccgctcccagcagaacagcgaccgccgcgcgctcccccacttccgctcacaacatggcgcctaagcgatacctgtctctcaaagcgaggctcggccgccgccaccaccgccgcgcgcacccaggggctgggctagtggaagacacgcccccggccgctgcgctccgctcctccctcttcccacccccctccttctgcgccccaacctcagcttctgggcctcgcctactttcaggaagggcgagcccaacagatctgggggcgtcggcgggaggcgggggaaagaaatgggaaaggcaggaggggcgaaggctgggagcctttcaccgccaagggtccaaggaggtcggaggctccttgggaatgagggagaacagtggtccccgcccagctggggagggaggtgggcaaagtaccgggggcgcagtcccgagccaaggacccggggaggggtgcggagtgtcttttcggcttgtctcctccgggggtgcgtgcgtgcggacgcgcctagtctctgggcgcatcccgtaatggcccaagaccctccctcttcagggtcacatgctgggaaatcacctgccccccatctcccccgacggaggcaagggaggcttcgtgcctaggagcctcctgggggctcggctcccggtttgattcaagtcttttcaagttgacgctcttttgttaaattgtggctatttgggattaattcctcttgtattagtcgcttcccccgcaccgcccccagcccaaattctcctccccaagtgcgcagagctctcggccttcagctgcgaccctggaaccgctgccccccgccccacgtctgctacctaaatcttcaagaggggaaaacagggaggttcctt

SEQ ID NO: 70582 - DNA, 2043 bp, Homo sapiens
ttgatctttgcagattagtgggtctttgttatctcggaaagcgggatttaaaaaaaatcctcaaccttacatattatcccctgaaaatgccaaacaaaaatagtagttgtagctgctttagtatatgcaagtaaacatttgttcaggtgagaaaggaatgtgttatctaaggcaagggggagaccgctatcacttgacaggggaggaattttaactgaaagggcactttctaaatttccagatgagcccacagaaatgacagacattgaagactcacagacttttgtgaacagaatttttgtggcaaaacatggaaaacagagaaagcatgtcatgttttatccatgtgctcggttgtgccaatattggctgaatgttgcacaacagcccggtagctgcacttaccgcagctgtcgtttaaggaatgtggcagatttgctagacttaaaaattgttccagcaaaaattccatttttactttaggaattttacttaggaattggggagaaagctcagaaaaatgcagagttggatgcttgctgccatttacttgtccagtctcatctgtcttccctgatatttgggctaggggcaggcacagctggggcggagtctcaatgggctggacagggttggggagagggagaaactgtcttttatccagggtggcagtgtgtgaagctgctgggcaaataacaagaatcaacttggttggagttggggaggaagctgctcaccccaaaacaaggcaaagtccagaaacaagtgccttgcaaggacttctgaagccaggggcaaaaaaaaaaaaaaaaaaaaaaagcctgcaaggattttgaagcctggtgctttctctatgcagtttctctgcaagctctcatgggcactgctgcatctgagtctcctttctctcccgttcttcccagctccctttcaccagttgacccggtgtggaactctgaaaatctaagagctcacccatctggaatgttaagaggcagcatctagataaaagggacttggattacgcaagagaaacagggctgctttttccttgtcattttttctttctatctatttgggtttttaaaaattgttataaaatatgcataacataaaatttaccatttacatgtttgagtgttcagtccagcgcacactcaaatacagttaaatacattcccactcatgtgcacccaccactgtgcatctatctccagagagagctttgtcaccttcccaaacagaaactctgtacccattaaacaccaactcccacttccccgcttccctgcttcccccaggttctggcaaccactcttctactttcttcccttatgaatctgattgtcctaggtgcctcatacgcgcagtttcatcattgttgtgtgggcataaaaatccctcctagcgctgtttgctgtgcacttgttgactgagggctggcctctaaatgcagacaggaccgatgggggcagatacgagggtgagggtgtctgtatagctgagcaaatgctgagcaggaacacacagcacgttaacaatatgtacacccacacgcatgctgctgggaatgagtgaagaggaagctgccatgttagaatggagtttgggccggagagtctctgcatttgttactcactggtggacggaggaagctgaattctaaaagccgtttaatgaaggaatggtgagggctgggcaaacatgattagtcacagagctccaggcctaggttatttattctctagagaagcccagggcttgtgagtgggatgaattgctgactggcaagctgagtaaatttgaccaagaggcctaaactgagggggaaactggtctctttatgagctctattgacactgaatagaaatatgggctccattccaatttgtttcctagcaaaataaatacataaatatcaagagaacttccttgttttcagaaagaggaaagagttgaagttattgtaagtataaaaggcaaatgaaaaggagatgagtggttttgaggatacgataaaaatatctcggtaggcagttacac

SEQ ID NO: 70583 - DNA, 1018 bp, Homo sapiens
tccaaagtcacataacaaagggtgtaatacagggaggggtgaaaaattcaagctgatcatgcactttatcacaaatacaatttctgagaatgtgggcaatttgattatagaggagggctttgttgatgttaaaataatgagctctggatgacattggttgcaaggtactcacttcctccaaatgcttactcatttggttcttactacttctaggagggtcacagtggttgaaactaaaattagctgtgttcaagtaaatgtgactcataagagagcaatgaggaagctggtttcatatggcattccctcccttcccaccctcacacactaggtaatacaaaagaaagtagcttacttgtccagagatgggtttatcttgaaatccctaacttcatgcaagttccaaccagtaaattaactgcagtggcttttctatagataatttgtttaatcagaaacccaggataataaaaatctttgaagtatttttaatgatcttttcctagttgaactaagtcagtgtccctcatggtcacccaaattaacaatacaagtttatgtttcttggtattgaatctacaattctgatatacaagaatctttactgaagcacgcaacaaaatgcagagaaagctctctccacagagtttttgtggttggtattttcaatttcataagaagataaaatgtgaagcaaactctaattaaagtatcttcagaaacatattgttttggctttggcaattatatagctaccttgcttctgatggcaattagaattttatatataccaaaaaaaaaaaaaaacaattttctcccagtgctctaatttgaaagctctgtgctccatgtgaaacaagcaaaaggtggtctatgttgattaattaggggttaggatattcagaaatactacaaagaaaattatcagggtgacttttctgtaagaagcaagtttataaacctcttgcctaatttgtacacacaacagaaaaagcactttagctccactgtacccgtg

SEQ ID NO: 70584 - DNA, 1046 bp, Homo sapiens
tgtttatgtcttgtttctctgattaaattttaagctctttgacggggatgactgtgtcttatttttctttgtattcccacagtagaggaacagtgtgcgtgccccttaaatatttgttcatttatcaggaggaaaagtagtcttgcctagttacttcatggaagggtatggttttcatgcccaattgtagcagaatcttttaataattatgttccttaatttaagacagtcttggaataggctggctattttgagctcttaaccttgtgttttagacaatctgatatgccaaatgctttgactaaattctcctgaggtaaagtgccagctttggaatatattttctgagaagccaactttgagtgctggcagaatggagtggctgactgccagccgggggcgggaaaacttgctctgaactttggttgactacctcattaactttactatgccatggatgaactctctccggctctccagggcctggggagagagagggagtgagggagtgagggagttaggagtgagggagtgagggagttaggagggagggagggagggagggagagagaaagagagggagaagcttatttgaggagcaactccagggcttaagccacagtggaaaatggtgctggcttaagacactgttggtgaaatgagtcagcatgtcagcttagccataggacaaagtctccacaagtgagctataattggagagaaaatttacatgaaactgaaagtaagcactcatcctcccccttaaagtaaaaacaggcctcagtggaaaaattttataccataaataatgcacatggagttatacttgtaaaaccatgggacctataggtaggaatttttaaaaatctagttttctccttttctttttcttttgagactttgctctgaaaataaaaatggttgattgtttttaaagtgacatgtgaaagaactttttagaccctaggttactaaatgtttgtgctgaagaaaaatgtaaacaaatacatatttttctgcaacctgtaattcttttaactgatttc

SEQ ID NO: 70585 - DNA, 605 bp, Homo sapiens
tctttgttttggtaaagtcttgtgacaccagactgcccctgagtcattcttcacagctcccacctccctatgacccatccacctcgtatttgggcatctgtaaagttcccagcacatctgtaatcagatagaatgcatcaggccccccgaggaagagtctgttgtcctaaaaatctgattttcagaccatagcaagtgatttcagcttatttaccgggatcaaaatttggcaaataaccatgatgtttgaggaccagagactattacataatcatccttcagtggagacaatgaggtcacatgtttacccatctaatcgatgatcagggacatgtttcattgcagataatgtgctcactggcccacaacttaattactgagtgtctgaatcaacaaagctttcagatgtaggtcttgcctaatggtgcatctgttaaagatcattgcctcagtttggcctctaaaagaaaggtctgggggatacaacaggccattgccagtgctgttctcaatgacctctcattgaaaaacatgccagttcccacggtttattttctagccagcaatagacattattgtgtatatgcagggccaagtagaaccaa

SEQ ID NO: 70586 - DNA, 705 bp, Homo sapiens
aaagtgcttccccagtcccctgagatacttgtgtggaggaaagtaccagttggacaaagaagaaccaggggccatctgtaccacaggtggaaaatgaaatgtgagcctccaaaacagctgttacatcagtcaatttagtgagaaaagtgggtcaagctactttctgactgattgccatggtagtgacagacacagtttaagaggaagcacaggaagcaaagaaaaatctaattacagataaatgaaggtatagaagaattccaccgccgtcccttttacctccccatgccttttccttacaacatgcaaaaacaataggcccaggagtgcttcatgaaaattggataattacatcaattgatgaaaaatagtttatggaatacctactagactacgccatgtccattatatcatgccctcgcagtgaccctctgaggaatggaggtgatcctattttgcagacacagactctgaaatacttggcccaagtcccagatggagacctcatgatcatgagttaactcgatggcaaagttaacagcaacagaacttgagattatgtaaccataaaagcagggtagggccaggtttttccaacttgtatgttcaaaatttgtattcatcaagagtgacttagtggctgcaattccagcacttgatgatatcactcaaatactccccatctcctcctttcaaaaattatct

SEQ ID NO: 70587 - DNA, 3540 bp, Homo sapiens
atgaaagacattatcacaccttgggcgagtatctgtttacaaatatttgcagggaggaagacagcacagtggttaggggtgtgggctggggagtcagattgcatgggtttggattcccactttgtcacctactaacccaactttgggaaagatcttaagctccagggctctgcagtttccacttcacagtaggactatccattgaacaccaaatgaaagataggtaagagagacaagataatataccagtctctctggaggacaaggagcaaatctgattcattcttaggtccctagcatttaatgcagtgctttgcacaacacaaataactgatagagcctaatggttaaaagcaagggttttggagctacacatacctgggttcaaaacccagctccaccacttaccaattgtgtggctttgtgcacacacacacttctctgatatcaatctccttgtgataaaatgagagaattaaatgacataatttatggaaagtgcctagcacagtgtctgatacctagtagaagctaaaaaatattgatctaaaaattcagttgaatggaatttaactgacaaaggattgtagttgattctacaaaatggacaattgtacctctctgactaatctggaaaagtctgcttggtgtttagaagaaaatgtttgcccttagagtgtccatcacagctgaaatgtataatgtgtgtttgtgggaggtgaccttctttcacctcagactcaaggggagacaggtgggaagtgctcccactggggcaaaatgccagcgggaggggaaagaaaagcaaatgtttccacccctccttctggataaaggcaaagtactgtgcggaggctggtatgtggcactgggcccactgaagggtattgattttttctttccaggaagaaatgcacattactcatttttaaataggctgtcttgttctggacagtaactcctgtgactttgaaataacgcacttgcgtgttttaggtataggctgcttttggagggaaggtgtgctgttttgattaagtgggtacacaggagagctctgttcttggtaccatgactaatgggataaatatctttagccctgctctgttcctgttcctcactcaactctcaaggcacatgacctccctagagctcattatgactaagaacttgttctatggtgctgtcttctcccttgcggtcaaatgtgttattctaacggtggtttgaaaagttcctagtccagtatcactttgcctggcacttatcacttttccgaatatttctgcagcaccgtattattcagtcctcacagcacctacccagtgaggtaacataccgacctatttcacagctgaaaaaactaaggcacagggacagaaatggagggcaaaaagaatgggacttaaccagcctgaagaaggaggagctgcagagacacttaggacctcattaatcatttaattaattagttaaataaatacgcagcaggtggtgcttttcctactaagaaaaagaccaggaaaaaaatagatacattgaaacactggaaatttaaatcagatacttagggatgcatccccaaaatatactggcacaccctactttatgggatagggattccaaaaagttgtactaaatatcatttgcttctatattcatgagttgattcattaattagttctataaatatctactgcatgtctctccagtacaatacatactggagaaatgagaaaaggaagaaaaacatgcgtcatgaagaagtttaccatataggagaggagatttgaagatacacagataaaacggaatacggaagtgccattaggttttcagaggaggaaggggcctgcgggagcagcaagcaatcccagggagggtttcgtaaaaggcatctttgaacctcaagcagctctgagcacaaatggagagggcaggagaactcaccagagaccagggctggcataaataaacacatcagaagccggaaagcacaggattttgtcaccaagtctaaattactaccattgaacctattactacagaggtctatttataatgcttgggggaagggaatttctaaagaacatgaactaatttctctcataatgtggattctcttcccttagattctgctttttgcaagttcgaagcaatgtcttgtgtgctttctggatagcaattgtgttaattctgtctggcagggatatggcagaggagagaacctttcctaattgtatctggatgttatttttagtacaaatcagtcgcaatgaaggctcacagattaggctagattgtgctttgcaacttctcaccccagagaatttggtctagaaggcccattgaaaaaaatacctgggatttccagctaagcaggttctgtaccatccaaaatttgtatagcctcacttggtaagcatgaaagtatacagctgtatcatcctgggcttagtgctcacctactgtgaatgtgtcccaggcagctgttctcctggctgtcctcagtagatgacctttagggagaaacctaaaaatgaggtgtaaagtcccttcccagcagactgtaggtcagggggattagaacaccacctggtttgtaccctcatggaattactaatctcaatgacctggaatgacctttgcagttatttttaagccaagtcgttggggattagtcatcacctagaatttaatatgtgtgtttcttggccttataacagaagactttgcccagtacacatgccatatatttaccctcaagtgcaacatgtaataaaaactgtgctgttctgtagtagttgttcatattatagttccagatgatggatcatcttgagcctttagctgctcatcttggtctccaaaagggaatttcttcagcaattatttcccacaagtaggcttggatcaggatctgctcttactttgataccgtcccccaaaaaccaagagccatcagggattttctccctgtatccacaggaggggtacaagagactttctaacttggggaaaattcccacaaggtcaaggctttttggttgccagggcccttatttcctagatggccagcatttggccaacaacttggtccttctgccacatccaccaggctcactgggcctcaccctctgcctgttgccttcctggctgcccagtctccctgtcagtcttctctgccccactctccctggagcacctgcagtctttctacaaaggaacaattcaccaggctcctgaagcttctgccttcaccatgggcctaactgaattgcagcatcttataggaaaactgcatggtccatcttttccaaccctttattttccttgcatttggctctgatccttcacttgactcttgcctcagctctctggacatggctacgtgtcctgtctttgcaaatccctatggcctgtgttggtactactgataccatgtctatatgtaaaaaacatccagcaattccactcctagatatacatatacccaaaagaattaaaagcagggactcaaacagatttctgtacaccaat

SEQ ID NO: 70588 - DNA, 1747 bp, Homo sapiens
ttttaaaagaccttggtgatcctaaagtgcaggtaaggttgagaactgctgctctagttcaatatataatcaggtatacattaacgttaaaatgtgtaggtgttcagagttctgatttttaaccatagcaccatctcaaatattataaaaggttgaaaaaagagcctaatttaatcaacatggataaatttcaaaaagcatgttgaacgatacaagccagacacaaagagtacttattgctttctatttacataaagttaaaaataatcagaacagggggaggggctactgactaggaagggacgcaagaaggaaattcctgagagggaaattttctccattttgattagggtacacgtatatatatatatatatatatttatcaaaactcacagaaatggacaattgagctctgtatgtatgatttcattacatgtaaatttacacttcagtaaaaaggataaacaattaaatctggatatctatgacagggtcggggagggagagattattacttcagacgaccccaaatcctcatgggttaaaagaaacagcaaacccctgaccagaactggcgagaatggagagtagacagcagggagggccaaagcctaagaaatcgctacaagactagatgccgagttcgaactactgcctggacggcagcgcccgagcgcccgcaaaaataagcccccgtgccatttccggtactagcaaatcctcctgtatgtccccactggaagagtccggtgggaaaccgtgccaccgcaaggaaggagccggcggtagcttggttcctgagcggatgctggggctgtaaggcgcgcgcggtcagctgttggcggtgcagggaggaggacgccggggctcgccttccctcctctgccgccgctgccgccatgattccggtgtcgctggtggtggtggtggtgggtggctggactgtcgtctacctgaccgacttggtgctgaaggtgagggccttgggcctaaggtccaagcccgcggtgcccatggccggagcgcaaggccttcttttctcttcccctgcctggcgcctcccgggctggacggtgcccacgtgcgacagtccgcgtggtggatcggcccggtggagtaaataaaacattgccggccgcgggagggttgtggcggcctgcgcggctgccactgtcgcagtgcggggcagtgcaggcccttcagccttcgggtcctgcccgggaggcgccagtggtgggatcgggagggccggggccctgccagacccagcagctgcagtgcagcagggaggaaaagaaaacgtctgcttagtaaagacagtgctttcccttattgtttttaagttcaaaacgctctagagactcagatattggaatgaatctaaatcaagtcgtgattgaaatcagtagtctcaaatttttaaatgcatatgatcatctggtttgcggtcaaaatgcagattccgattcagcaggtctgcggcaaggcctaaaattctgcatttctaaccagttcccaagtgctactgatgctgccagatcacagagtgtacttcaaagtagcacactcaaatagcaaggatttacataaccagtttctaactacttgaattctgatttacacgctgcaccccacttcttcacactaaccagataccctgggtgcacggtccattttccagttatttgagaagggtagcaaaaaatcaggaagagtcgtctgaccacatgcttcaggcaagcttttg

SEQ ID NO: 70589 - DNA, 1850 bp, Homo sapiens
gtggtgggcaattgtaatcccagctactcgggaggctgaggcaggaggattgcttgaacctgggaggcagaggttccagtgagctgagatcacaccactgcactccagcctgggcaacagagcaagactctgtctcaaaaaaaaaaaaaagatattgctgcattgtactgtgtgtgtccagtgcatgagtcattttcagtattacatgtaaacatattattactctagtcagtgtctgattgacattgattcaatttaaatgatgtttttctatgcactgatgtaacactgaaatgtgttcatttgaatattttatacaggcagcactaattacaatgatacttatgtaaatcaaaattggttaactaaattgaagtatttatgccttaaattatgatataattaaactgcttttttttttaattaaaaaaagtgtgaactgttttaaatgtaaaacgaaggcagaattgggtggagaggtagagattattactgctgtgcctggaatagagaaacagaaacaggaagaaggtatgttgcaaatttgaggcaatttgccaaggcaaagcaaaacaaaaaaagctgtttgttgtgtaaaaattgttcaaagataacaaagcggacaatattaagagacattttcagcaaatacagagagaatttgataacaaaagtgaaaaaaatcaataaaagtagttgtcggaattcaaaattgaatgtccaataaaaattgtttaaaaagtgataacaggctctgagcttggaactttggctagctttatactggcttggattcttgcacaaaaaaggaaaacagttttagatggcaatagtaaaagaaattatttcagttatggaaattttgtttaaaagttgtaacgaaaagactttaaaatatattttacaaaaaatgaaagctcttcaattaaaccacaaaataattgcctgtagaatacaagaccagtatccaagattaattaatttaaaattcgaaaaattgcaacgattttagctttagatgattcatgtgatctacgacactgcccaattaatactttgggtatgttttgactcaaaggactcccatatttacaaagaaatgccaattcatacctttaaaaccttatagcaaaaattttttaaatcttttacatctctcaaggaagaacttcagttagatatgaaaaaaaatcacaatgaatactgctcagccatgttaggtcaaaattccagatgtattggaattttaaaataggagtctgatgttttcctggtgacttcatatcactgtatgacacataccgaaaatatttgggctcccttctctgaaacagactctgtgaaaggagtcatgaatgctgttgttaacatttttcagcatatacgtgcaaatgctgtgtgtgactcatcaccagtttcaagaactgttgaaagaaattaaagacaatgaatttactcttgtgttcattgccagtgctcattggttaagccatagagttttaccaagctgttaactccaattcaaattttcttgaaacaaaaggagtgcttgccaaatatacagcaatcaaagaaaaaaaatagcaatgtgatttatgtgttttctcacggatatcacactgcataggaacaagataaatttaaaactccaagaaaaggaaaagcttatttgtgacttagctagacagttaaaggattaatgttgaaattgaacttttttgtgatacaagtcgataataatgattttatacctttttctaacatgaatcaaatatgcataagactttattaatagacagttatgtaaattggctgcaaaaactatagaaaattttaaagaatgctttgtt

SEQ ID NO: 70590 - DNA, 1579 bp, Homo sapiens
cagtcacacaatcatggctcactggagcctcctgggctcaagcagtcctcccacttcaacctcccaagtagctgggactacaggcccatgccaccacgcctggctactttttgtattttttgtagatgcccggtttttctatgttacccaggctggtctcaaactcaagggctcaagcagtccgtccaccttagcctcccaaagtgctgggcgtgagccaccgtgcctggccaaatgaacatatttttaaaatactgatatgaatatatccttaaagtacaaggcctttataactaacattgtaatatgccaggcaatacaatataaccagaagagacatatggcttagtggagaggagtgaatcctagcagtgatcgctacgtaatgattttaggcagatactcaagagtctgacagagggcagtcatgggactggttgtgccacggggaagaagttgaaaatggagtttcaaaagatttgaaaatcagagttgggtcaacacgcataaatttacttgctttgaagacgttgaaatgggatccaggaacaggaaaaaagaatatttattgttttgcctttgcatgccaaaatgtaatctctctttttcttctagactttccttaaaataacagttgtctgcatgtagaatgagtgtgttttaaaagagccattcagggcttttttcgatgctcatttcctgtactgagtagcaacatgatgacagactagaaattctactgactgagtcagactgaccctgaagccaagcctcactctgccacagactggcatgaggccttgagcaagtcacttgacctcggtgtctcaatactgtatttaaatgagagaatgaaccttgcggggtttggaaggttagaaataacacatataaataactcatagtactttacaaatgccgtggtctatcctaggtattcaataacggaatttagacgtgaggacaatttcatgaaaagtttagtttaatgaaaagagctctggtctgggaaccaggacaccagggttctggtccctttctagtttatttaactagtaagctcctaaccttggcctcaaacgttttggactgtagtcccattaagcaaggagtgttggcgagagagaaacaggtcaagttcttggggagctggcagggagctaacatggtaccattaatacaagttgggctgtttttcactggcaggctgaacactgtgctgtggaaacacggaggtgagcgaatgagtgcgcagctctgcctgggccagggggcgccacttgaactgggcctgcttgaatgctcctgtatggatttttccactggagaaaggagggtgttccaggtacccaagatttagcaggtgaagagacagggtgctgccaccgtgcagaatggtgcttcacatcaaatgccactgcaagcagcttctgagactgcccctgactattaagttgtatcaaatacatgttaagtaggccaggtgcggtggctcatgcctgtaatcccaagcactttgggaggctgaggtgggtggatcacttgaggtcaggagttcaagaccagcctggccaacatg

SEQ ID NO: 70591 - DNA, 1807 bp, Homo sapiens
gatgatggaggcatttgcccagggatattgtcagtgcagtaaagaataattttagttcagacgctcatgctgtctcccctttgccatcattttgttgaacagcagccataaccccagtgtcaaaaataagccccccgcaaaggctattgccattaatagaggcgccagtgatggaggagtcctgctagacaagcaactccggagtctgcagtttcctaattcaatattaacaacaatgctgtcctcttactggcttctccctcattttattttgcgtgaaactgtggataacgtaaatgcccaagcgctttctattcagtcctcaaatgcaaagcagacccttgctaataatggtaataatccgaatgggtttaactgcagcattgtaagaaaaggcaggcagtactcttagactacaggggtggatctcatcatttgattttcccgactccgccaggaaataagaggggccttggcttggggagaggtgtgtggggaggcgtaaggggtgggccccccggaaatcctgctgcgctgtttaaacctaaggtgacctaacggatggcgggagcggccgcgcgagccttggagcagggcgcggccattggtgacgcacgccggggagcacggcgcccacgtttccaccattagcgaggcctcacacccggcgctccaagttcggggctggaggcgtcccggcttcctccctcccggagcgggaccggccccgcccccgcgccccgggtcgctcccggcggcccctcccacctcctagtcctggcctccccgggcgcagcacactcccagccggccgcagcctgacacgccgcgcggccccccagtctcccgcggctgctcccccaggcatggcacagggcctcgcctcactatggcagcagcacggcacagcacgctcgacttcatgctcggcgccaaaggtgagggcgcccgccgccacctgcgtggccatccccgccgctcccgccgcctggcgggctggggcgggggtcgggcgtggcgtgcgccgcgggccgaacaatgcgggcggcccgcgcggcgccgcactctcccggactgccacgcacagcgcgctgcggggccgcgtgcaccggcggtcgggcggaggccgcgctcctgctggctccgcgctccgtcccggccgcagctcggggcctgcaggggcagtcccgggtgcccgccggccgcgccgcccttccgggccctggccgtccacccgcgctcccacgcgggctcgccgccttcgcgctcccgctcggggagtccccgggctgccgggcgcgggcggaccccccatgggacgagggttgcagggactgcggcggagcgaggcgtgacccgcgcggcgagcccgggctgggggcgtgcgccgagcggggctgcccgcgcgaccttttcctgttcttgcaggcgggtaaatttccctcttgggggcgggggtttcccctcgtagggagctggggctggggaaaggtctgcggacgcgcagcgcttgcagaattctcagccgactgcgtaggagacggatcccccggaaaggaactgggggacgggaaaaggaaacgattattattattgggggtggggaggcatgaggtctgggcgcgggaatcgtttacaccccgaatcggggagctatcaaaagacagccggccgggcgcggtggctcacgcctgtaatcctagcactttgggaggccgaggcgggcggatcacgaggtcaggagttcgagaccagcctagccaacatggtgaaaccccgtctcttctaaaaatacaaaaattagccg

SEQ ID NO: 70592 - DNA, 1404 bp, Homo sapiens
attgaaatgattattgatgatgtaagcacaagagaacagctagaaattggcagaagtgacccttctcccaggctggtatgccatgttggttagccagatgacaaaagaaatacaatggtggtctaacaagaacaaggacaatggcaatctgacaaagacatgtcatacatttttgaaatagtcaagaagactctaagaaatgtggatttatattcattgtcattgttgtattaaccaaatcctatatggacactgtgtcttgaagaattaacccaatggtgtttgaagaattaatgacttttgaagattttaaatttcattttacctcatcttttgaaatttctgtttttgtatttgttaaaaatattcctaatatattagtctattagtatatctctatagaaattaaacatccatgtattgggtgtgtatgctgaaaaatattttactagtaggagcgcatgtccactgtgtcagaatgtcatacaaatgagagtgtagtttgttcttgatgggcttttagcatcatcatgtcatattgctctcatgtgattggctcaccagaaagccatttcaggaatgtgtgttattagtcaccatggtaatggcacagctgggaggggaatggatcattaaagatccatcatcactattgagttagaaattaactgagatcacacattcttctgaggtcaggtcatcttttgcttatagaaaaaggcaacccttaaaatttaacagatttttaaagatatgtattataggcattacatgagcttatgaggttgttcatacatttggaagtgaaagacaaaaccctagaaattgactatttgtcaagcattttgttatttatttgaaccctgcaacaactctgtaaggtagggatcatcctcattgtatgaaaaataaagataaaatcacagaccttaagtgacttgtcgaaactcacatatttagtaagtatagaatgagggtgcaaaattagatgattggtattagccaatattttgctgttagtttccaaaggcaaagaatacataggcattgtatcaagtcacctaatccagtaagtcctcacttaacatcatcgatagcttcttggaaactgtgactttaagcaaaatgacagataatgaaatcaattttaccataggctaattgatgtaaacaagagttaagttcccatggcatattcctgctcacaaaaacatcaccaaacttctaaataaagaccaaaacacttctaatattgaacattgaatacatgtgagctatgcgtacatttaagaaagacaaataaaagcaagtaagataattttttttgatctttggaacccattcaatgtttttgtagacatattcttttttttatccttgttttcattttttaaattatacttt

SEQ ID NO: 70593 - DNA, 948 bp, Homo sapiens
aaggtttgttaaagaaacacgtgtcatgggggtttactgtacatattatttcgtcacccaggtattaagaccagtgcccaataattatcttttctgctcttctgcctccttccaccctcccccatcagctagaccccagtgtctgctgtttccttctttgcgttcataagttctcatcgtttgcttcccacttataagtgagaacatgtggtatttgagtttctgttcttgtgttaattttatagtctaccatgtccatttgtcttctctaaaacacttggtagaagacaacaatggtgcttttctggctttaaaatagttgtactaaattgaagcatagcttcaagcttatccagtcaaagtattctcttttcccccgagcagttggtgccacaacagttcttaaagttatttccactatcattctctacttgttttagttcattagaaaataagtgctaaattttttagaagattccacaattctatttttatcagaatgatgtcaccagcagagcaggatgtctgactcactgggattcaggtccttgtatgcattttgtcactaacccttggttaaaactctgaggaaatcacttgccttctctaggcctcaatttctctactcataaaatgggacagttttattaatttagaggtctcttttacctctaaaattcggtgacattataactaaaactgtataccccagccttgtattaacacttttttgtctaatctaggggaaattgcatccttgtataattgaataaaacaatccttttcaatgacaagaatagtgcattctgcatttttattgattttgcaatttaactggtaggttttcattttattctttgcttttcttttcatcatgctttattttaattcaatttgaaggtcaaaaccatatatatatagatacatatatcggggaaaaaattaaag

SEQ ID NO: 70594 - DNA, 868 bp, Homo sapiens
ttttagtgtctctacatttcagagaagttgtaataggtttatatcagtggtctttaatcctgactgcaccttagaattcctggagatctttttaaaacttctaatgcctgggccctaccccattcaaaaatccctgggatacatctgaagcaaggaccatccttaatgctcctcaggtgattctaagctgcagccagggtggtgacccactggttttgtaactgtccagtggattcattttgcccactgcccaaatagagctgatttatcaagacacaggaattgcaatagagaaagaatttaattcatgcagagccgactgaatgggagaccagagttttattattactcaaatcagtttcctaatctcagatactagggtttttcaagcatagtttgacggtagggggcaagggagtggtgagttctgactggttgggtcagagattatatcacaggaagtcctcttgagctgagtcagttcctggatgggggccacaggaacagctggcaggcccaggtggagccatcggtggtcagaaatggaaaaacctgaaaagatatctcaaaaggccagtcttaggttctacaatagtgatattatctgcaggagtaattggggaagttgcaaatcttgtggctaatttgttagtcttacaaaggcaatctggtccccaggcaagaagggagtttgttttgcgaaagggctgttatcatcaaagttaaactataaactacattcctctcaaagttagtttggcctgtgcccaggaatgaacaagggcagcttgaaggttagaagcaggatggaattggttagatcagacctatgaactatcataactttctcactgttattatttttgca

SEQ ID NO: 70595 - DNA, 1116 bp, Homo sapiens
agtattgtgtcagaccatgaccccctccccaagggctagtaccaagtcttactcatctttatattactaccatctgaaacgaaagctatgaaacctcagataaaaaatgcttatagcttttgttaactaataatgaataagtaactggcaaattaatcaaataggtatatggaaactgtctcgtactggttttttgtcttgtgtattgtttaagttaaaataatagagttgggatgtcagaaattttctgaagccgaccacagtccccagctgtggcttagtaaccaaggaaaaccaaggatttctccttctgatccagcagtcggcacaatgccaggtgagtcagtgaccggtagagcaggtggtgacacattctaatcatagcccagctctaggcaaacagcagctgctaagagttcctgctggcctgagtaagttttccaggcccagccagccaagagcagccctagttaaaacccgccagcagttttcccatctgtctccctcatgctacttgcgacacttcacacatctcaccccaaagtgcattgggactcttgctccccgtctctactaaaactacaaaaattagccgggcatggtggtgcacatctataatcccggctacttcggaggctgaggcacaaaaatctctcgaactcaggaggcagaggttgcagagagctgatatggtgccactgcactccagcctgggcaacacagcaagaccccttctcaagaaaaaaaaaaaaaaaaacaataggcagaagtggcttagcacacagtactatggccgtcttccccaaagcttggactacagcaaccaatgtgaggcttagctctgcaaggagacccaaatcacagccacttcatgctgatcatcagttctttgctacctccacagtaattctagggatcatgccagccctggaggtggggagtcctggggggagggaaaaagggtgcaggctacagtgggtcaggattctaagggaaaacactgagtgaggaagctgtgagggccttcttaatgactggcttcttgagctgaaactggaaatcagagccctctggttatggacattggatttttcatatcccagagaacggttgtta

SEQ ID NO: 70596 - DNA, 1509 bp, Homo sapiens
aatcacttcaagaaaaaaaattagtaaatgtctattagatcttgaaacttattcctgtctatctggaacttggtaacctctgaccaacaactaactccccattccttccctctcgcctcgccttccctacttcccaacctctggtaagcagcagggtaaatacagtcaataataatgtatatttcaaaatgaataagagtaaatttgaaatgtctcaccataaaagtcataggtaaacaaggcgatggataagttaatgtgatgtaatcatcccacattggatacatatttcaaaaaatcacattgcatcccacgaatgtatacaattatgatttgtcaagtaaatataatttttaaaaacgttaagtgactttttaaaaagcttattagaagtataaaatgcaagccattcacaagcatataggttagattccgcttgtgaggggcttgtgtgcagtggtgaggctttgtggaagagatggacgtggaaagatgtctaaaacagcgcggaggtcaggagaccttgtcgctgccttcacagagttgggcaacgctcccggtcctggtcagccgcgggacgcaggcgcaaatgcaggcttgggatgggggaggtgcggccggcgcccacgtggcggggcggggagcagatagggggggtagggggaggagctggtctcgcgaggccgcgccccggttcgcgcgggcgtcgtgcacgcggttgtagctgcccggcggcggcagaagcggcgctcgcgccaagggacgtgtttctgcgctcgcgtggtcatggaggcgctgccgctgctagccgcgacaactccggaccacggccgccaccgaaggctgcttctgctgccgctactgctgttcctgctgccggctggagctgtgcagggctgggagacagaggagaggccccggactcgcgaagaggagtgccacttctacgcgggtggacaagtgtacccgggagaggcatcccgggtatcggtcgccgaccactccctgcacctaagcaaagcgaagagtaggtggtgtcccgccaaagggtgggaggggagattccggagacacgtgtaccccggttacacccccggaatctgggcttgggcggcaccccctgggctgcctccgggccctgggcgggcctggttctcacctaggagggcggggaggggaataaaggggagttctagctgtgaagaaaggtatggtttccactgatcagattttagaagaggtagtggttaccccaaaagccgcagctgagggaaagtgggtggccctagtcccgagtttgcatcgaggatgttgggcaaactgaaacagttcctgaaacatctcaaagtgccttcagcacatcctgtctttttcaggtactatttcagcgaaggaagacattgataggttgaataatgattcacaaaaagtttgattaaacagaaaagttgctaaacacagtgctcgggaggtcaaacatttcatttttctttcttcctttttgtttgc

SEQ ID NO: 70597 - DNA, 1914 bp, Homo sapiens
tgactacagacatgcaccaccactcccggctaatttttgtatttttaatagagacggggtttcaccatgttggccaggctggtctcgaactcctggcctcaagtgatccatccacctcagcatcccaaaacgctgggactgcagtcgtgcaccaccacacccggcctcaatagaattttcaagaaaggaacacagggttataagagaaagcacctgaacaagaccatggagcttttgtagaagacctttcacattgcaagctaaagtcaactgtggcccctctcataatgactttcagtctgccttcaaatagtttaacaaaggttttttgtttgtttttaagtactataaacaagacagaacccttacaactgataacaaagtccccaggaacagtgagtgagtgagagagagagagagagagagagggagagagagagagagagagatatccaggacccccaagagaattgatggggttaatgtgagtcaaaagcactatgagtcacatcagggggacaggcccactggcagcgagataacttcagaaactggagcaggtgtgagccccctgggatgcagccaggcagaaaacttggaaagggtggcatgctcgggtgaaagggattagggagagctagacacgctctggagtctaaggccctcaggccttaactgtgccagctgggaagattacatatacaaaaaggcatcctcccttacccacgtggcccaatcaaagcacccagcctcttataagggctttgcggctcattaaagttaagttcaaattggcaccagggtcctagacgcacagtcctagggtcctgggagccaaaaggtaccctgtaatctctgccaatgttacaacaaacttaagtaagagccgaagtaggtcaagcatttaatcctaaaaatgttctccaaaggaagatgaagggctagaggtaacatagaactccaaatattatctttctgacaaggggctaccccgacgcggctaccaaccacaccccggatgagcaaggccaaaggaattttagggaacacccaacttcctcccttaaaagtgctgctttgcttttaatatcaaactcagtgctagaagtcgccaaagtgggggcgaggttctcccaaccaaaggccggcgggcttatgtccggtcggaggtacagtgggcgagcgccccttatcatagagcccaaatgcccatgcgtggcccacttcttccgccggggccagcccgaagctctaggggaagacgatggcaccccaggctaccgccctgccagccccttccacgccccgccacctaccgcagtgctgcccgcctcattgcgctaggctgccgtgcgcgcgatggagaaccgggccccgcgcgctagtcggcggagggaaactgaggcgataaaagacgcacgagtaccagaccgcgcccttgctgaggacagcccgggagccggacagcggtgtccgggggcgggaccgcggcgtccagggggcgtggccgcgctgtgccgggcggaccctacccgttcattggcgggaggctggagtccgcctctgcggagcttcccactcaatcagttgtgcgggtcgtgttgctacagcgaggaccggcctattctcggttgagtaaacgaaccacgcagcaacgccagggcgtgacgtcgagaagaggcccggctctgcctagtggagcttgtctcctttatccttgatccccgcgccttggctccgtctgttcttccccttggctgcacattggaatctcctgggcaactttccaaaatactgatacttggccgggcgcggtggctcacgcctgtaattccagcactttggaaggcctaggcgggcagatcacctgaggtcaggagttcaagaccagcctggccaacatggcgaaaccct

SEQ ID NO: 70598 - DNA, 444 bp, Homo sapiens
atgactcaccccaacatcctccaccttcagaatgagttttcaggtaataacttctgttgttgccagcagactatgccaaacattcacttgcaccagggccagaacattggtctgttccttgttcctcaggccagaggctgtttgggtgcagggtactctcgcgtttccttctttgaagcatcctctattttcctggattcactgttaacatttagttgccagttgacaaatggtacaaaggttggtaagctggattttgaactttaaaatctactgcatgtacccagaggccacagagaaaagagggggtgtcttatgctttgtgcactaacaggcaattatttactatgatcttcttactgagtaacctctatacctagattcaaagagctgatacttgtttgttgttgttgttgttgttttgagatggagtctcctaggctg

SEQ ID NO: 70599 - DNA, 1173 bp, Homo sapiens
ctcagcaacctccgccccctgggttcaagcgattctcatgtcttcagccttctgagtacctgggactacagacacgtaccaccacgcccggctaatttttgtatttttagtagagacggggtttcaccatgttggccaggctgatctccaactcctgacctcaagtgatccgcccacctcggcctcccgaagtgctgggattacaagcgtgagccaccgcacccagctgataatgtgtgttttgacctgaccgtggtggcatatggacaagacggtttgggacttgtttatccaggaataaagttcatgttagcaagcagtgaatctccctcagtgatttgggctcagcttggaaccatcctgagaggcacattatttcttgcagactgcgcaattggggtcctctgaaaatgaaaccaaaatggaactcttgcttatgccacctgcttctgctgagggacacacagctctagtcgcctccagcacaagattcatgtggggcggtggtaatagtgacacttccaggtcacttagggaaatctctcgccaggagatgggcaactgggccattgatacagtggtacccggccacctttcatgagtgcctgtaattaaaatgacattttaatttggatttagatatatgataaagtgagacagaaagacaaataaacatgttttcctttaattttttggaaattttattagccccttataaaaggtttagtatgaaactagaaaattcaatttggataacttagtttctttttctctaatttagtttcatttctctttacacaaatgtcacttcctctctgtagctttccaggccactatgctgcctcgtcaccaagacttcgctagcactccatcctggcagaattaattgtttactgcttcctgtagatcatgtggcacattattcactgaagcagttatcacaatgtatttgattacatttctgtttttttttctctctaggtggcaaattctcagaagtcagaaactctccctgtttgatctttgtagtgtcaggacccagcataatacctgacatatagtagatgctcaataaatgaattaaatggaattgaattagtatattggctttacttattattttgtttgttttagtcccctcccccctttaatgattctttctttctttttttt

SEQ ID NO: 70600 - DNA, 5582 bp, Homo sapiens
cccaaagtgctgggtttacaggcatgagacaccacacctggccaccatctgtttttcagaataggttcttcttgtcataaggacaaagcaaagcaaaagatcatgaaacaatgttttttcttttttttttttttgagacggagtcttgccctgttgcccaggctggagtgcaatggcgccatctcggctcactgcaacctccgcctcctgggttcaaacgaatctcctgcctccgcctcctgagtagctgggattacaggcactcgtcaccatgcccaatttttttttaaattatttttagtagacacggcgttttaccatgttggccaggttggtctcgaactcctgacctcgtgatccacctgcctctgtagaaggagggatcagactatccccaaaagaccacccctcacattcaacaagtgattctctgcctttgctagcaatatcctgtatgtagaaaagaaagcagaagtagattctctgttacccttcctgccctagggggattccacggatcctgagtcaccctgggagattatgaaactcaaaggtctttctcaaagatctttaaaaaccactgattctcaactgccaaattacagctactagtctttcctgatagtgttggctagacctcatggatgaccagaaggccttttcctcctctgcttctgtctaaaatgtcaggacttaggagagcttgttatacatttcctggtaacagtaaattagaccgctatgactaagcgctagtgacagctgcgtagctaaagcaaaaccaaagccatcttctgtttgggttgcttagtttaatagaatagtgattgttttggccgggcacggtggctcacgcctgtaatcccagcactttgggaggccgaggtgggaggagcacttgagcccaggagttcgagaccagcctgggcaagatggtgaggccctatctctaccaaaaaaaaaaaaaaaaaaaaaaaaaaaaaaaaaaaaaaacttatcaaagaatccaaagaccttaccttcgaaaattgtaaaaaacagtaatacacaagcacatattcttttagtcaccagagcaatgacatcatcacatattctgtaaatgtataattatttcaaaaaaaagttaaaggaaatgaagcacagaagatgaatcaagtagggattacaacaactttcaacagcaaccgaagtcagaagacagataccatcaatgtgctgaaagaggaaaacttctgaacctcaaaatctataaactatgaaataaacccttcaagaattttaagatgggctggtccaaaggtagtgagttatctcagttgattgttcacaatcagttacacatcaaactccttattttactctgactactgcacttgactagtctaaaaaaagaattataagatgaattaaagacacgttcagataagcaaaactgagaacgtttggcaaaagcagatctttactaaaggaaattatgaagaatgtacctcgggcagaaggaaaagtgtcaagatcaagtgtcaaggaagattagagatttaagaaggtataagaaggttagaaaagtaagaaaaaaatatgccgtcaactctaaaaactacaagtataaagaaaaaagattattgggaaatccaaataacctaccttaggaaattctaaaagaatatacgagctcacattcctttggtcataagagcagtgtcatcattagacatcaggtcgcctctggaaaattccattgtgagtttaaaaggcaaatgacgtctataattctaaaactagttctcccaccgaaactctagaaaggatcttgggatctgcagggtctcccggatcacactttgagaactgctgctttagtcttcctcccatctcctaaggccagagctcctgagtttgcttcccactggccaaggagaaaagagcaaggtcacttgtcggggggctgcagagggaattaccttctttcatttgcaaatgttactgggggacacaccggctcccagtagggtttccgccaaggctccgcgaaacgccactagagggcgccgctagcgaatcccacagcgcgccccgctgcccccacttttgtcctccgggttcacacgggcgcccggaagagagggtggtgcctgggagaggaaacgatgcgccccggggccgcggcctcattggatgagaggtcccacctcacggcccgaggcggggcttctttgcgcttaaaagccgagccgggccaatgttcaaatgcgcagctcttagtcgcgggccgactggtgtttatccgtcactcgccgaggttccttgggtcatggtgccagcctgactgagaagaggacgctcccgggagacgaatgaggaaccacctcctcctactgttcaagtacaggggcctggtccgcaaagggaagaaaagcaaaagacgaaaatggctaaattcgtgatccgcccagccactgccgccgactgcagtgacatactgcggctgatcaaggtagcggagagccagagctcctcccggggcgtggggtggaggtggctccgtttcccagagtggggtgattcacgtcttgaggtctcggccggtgtgagagcccagcctgttcccctttctgcgcccatccccggctcggccgccaccccgcccgcccgccccattccgttcccctgagctggccgggccggagcctcattttgttttctacttttttctctcctatgtgcatccccccaggagctggctaaatatgaatacatggaagaacaagtaatcttaactgaaaaaggtaattcaacagtggcgggacgggggacaagcgttcggtgcctgtcaccttcgccaaggccattaccgcccctgctcccccttcttgcagatctgctagaagatggttttggagagcaccccttttaccactgcctggttgcagaagtgccgaaagagcactggactccggaaggtaacccctcgccctttccagaagccagagagaccaagtgttatgtaagaagtagtgtcggctgtgtagaaccactgactacacaggccgaagttactgagaacttggacagaaaaaatagccagcaagtgttcaaactactgaggaaaaaaaaaaattagatatgctgcacttaagaatactagggcaggttaaaagagctgtttaagtaagtatcagagtgctgtggagactcggaagtgtttaagctgcttaagtaagtataagtgctgtggagacccggaagagttagatataatgtcatttgttgtaattcagtttcataaaatggttcttgtttgaccctaacgtaacagtttttgtaattgtgttaaatcacatttttttctttaatttgtcccaatcttcaggttacagtctctagcttcgccatgtacatggcccttccgtgtacatggatgggcggggaggtaactaaaagatcctttacacaataaagtagatgatcatgataaatgaggtaaggtcctattatcacacacttcaaacacggtagatcagaaacccactatgatactcgcttcctgtctgtttgctaaggaatataaaatggctagaaagtttaatttgaaacctttgcctccatttggaatagtagacaccagttaagagggtgtcagatgccttttttttttttttttttttggctggtccctgttgattggtcagaagacagctcagctaaaaggggaagttgtctgggtggttgctttttttctgacgtctgttcctcaggctggaagaaatgagcagaaaacaagggatgagtactttttagagtatgtgcatgttacgtaatacctgtttctgggcaatgctgcttcttctgactcaacaaatggggagagcaaattgaaaatgcgtaaattggaaggcaagttctgaaattaaacgttgtactttggcctgatgttctgacctttaaggaagcaagagtttgtaaacttccaaatatttactattctgaactgccgtgtaaacctgacgtattcccaagtcaacataccagtataccaataggatgtgaataatgtgtgtgttgagtttaaaaccatagcagttttgctctggcaagtaatgaaagcgttctcgcttcctgagtgtgagctccagcagactgcagagtggccagtccacagttgtagcctgacttcagtgagttctgatgtgtgctttttgcaaatacatgttctcagaacagtgagatcatccagcagtggcctggactgcactcacataaaaatcatgagacagccatggctacttgtttctgtaatacatgcatgtgtgttttttaaaacctatgataggcctctgattctgcagctgcaacttttatggaatgttttccttctccacatctcatgtgatgctcttattacaggacacagcattgttggttttgccatgtactattttacctatgacccgtggattggcaagttattgtatcttgaggacttcttcgtgatgagtgattatagaggtacgattgagttcggagcagagggtctgaagagagttcagagttataaatgcttacaatgactttttaaattgtactctttctttttaggctttggcataggatcagaaattctgaagaatctaagccaggtatgtcttagtttttggtttccaaatttgtaagtttactggattattttaatgatggaataaaaattgggtcttgagagcaggctgaaatgtcactgagtgtgtgttttactctctcataataggttgcaatgaggtgtcgctgcagcagcatgcacttcttggtagcagaatggaatgaaccatccatcaacttctataaaagaagaggtgcttctgatctgtccagtgaagagggttggagactgttcaagatcgacaaggagtacttgctaaaaatggcaacagaggagtgaggagtgctgctgtagatgacaacctccattctattttagaataaattcccaacttctcttgctttctatgctgtttgtagtgaaataatagaatgagcacccattccaaagctttattaccagtggcgttgttgcatgtttgaaatgaggtctgtttaaagtggcaatctcagatgcagtttggagagtcagatctttctccttgaatatctttcgataaacaacaaggtggtgtgatcttaatatatttgaaaaaaacttcattctcgtgagtcatttaaatgtgtacaatgtacacactggtacttagagtttctgtttgattcttttttaataaactactctttgatttaattgtttggtgtaagcatttttactagttctttatttcttacacatctttcttgctgttgaagacaaaaatgacccgcaaacatcattggatgaacagaattgctcaaaatagtttttaacccaatttaaagtttttatggtcatgtgttatgttagtattaacaaagtctggatagaagccagtttaccagttggctatcaaggttttatacatagcaacatgtaaaacatgacttttttttttttttgagacacagtctcattctgttgctcaggctggagcgcagtagta

SEQ ID NO: 70601 - DNA, 977 bp, Homo sapiens
tgttggccaggaactcctgacgtcaggtgatccacccgcctcggcctcccaaagtgcccccatttcctttcattcgtttggagaactcctctactgcttgcatggttacctggtacaatgatcagtcatgatgccctgcccctctccaagaccatcccaaagagttggctcagggctgggcaaactgggccaagccaggatttcatggctaacactatttcgcaatagttcgcaagctggaggctgtagcctgggactgttggctgtcatcttccttgccttgagggtgcgcctgctacaaaatgcagctgaagggtggcagaatactctatgccaaaatatgccaccatgacgtaaggattacttcaagctaaaggcacttgaaaaacagcagatacaagaagggcattctaatctcccctttgcttcctgcaaacaggagagagaaactcccatgtgaacatgccctccctgtaccaggaaaaaagtaacattcttccccggggagtcacagctctgagaatcctgtacaaacatactttgtgaaactaattcttaccttcctttaacaaactccccacataatttagttacttttccacaactgcctctctttgttcaacctaatacaaaagcctgttggttttgtcacttctttgggtcttcatttccttcccagggctcctgagtcacataaaacttacattaaattagtacgcttttctcctgttaatatactttatgtcaatttaattctcaggctcagccaggacactaagagaagagagttttgactctcctgcacattcaagacctgtgggaatctgagccaagcattgacataacagcgcagcagcagtttatgatctctctcttcctttcctttcctttttcctttcccctttccttttctttctttctctctttttctttctttctttccttctttctctttctctctctctctccttccttcc

SEQ ID NO: 70602 - DNA, 690 bp, Homo sapiens
acggcagagcaagaccgtctcctcccaaaaaaaagaaaaagaaaagaaaacgactgcccataaagactcctcttcaccccctcccaccagctaataagcaaacgtgtaccaccatatcattatatccagaatctaaggggtaaagggcattcaaggacaaggccttacatgctaaacaaactgtgacaaattctccacttgagtcttgtcaaatagatttccctagcagcaagatatgtgactcagtgtaggaaaaactaaccactggtgcagaacacacatttgcttagaaagccttaggccaaccttaattaccctgcctaagaaagagaggcctccacagggggcggggaggagggaaaacaagctagttgttggactggaagcttccagaaccacagctgtagcccttaacaggatagctgacctgcgcctttcatttgctttgatttcatgtatgagtttaattccaaagttgcaaataacaggaaatgaaccacagtgttagccagttaacatcaaaggtagaaggagaccggcaggcggactgttaaaagaattaaaagagtaaacattccggtgagtcattagctttcaatactcactagaaccactagaagcaaaactgcgtgggaacctacaagtggacactccaagtaagagcctacctggaggccgggcacggtggct

SEQ ID NO: 70603 - DNA, 676 bp, Homo sapiens
taatatattacacgcatctcagtggttgtgaccactgtcttaaccaatctcaattttcgaggcctggcagaatggtgacttaaaaaatatatacagaactgaactaataaactggaaaactcagcaattctgtcccctaagtaataccagatacacgccagttttccttttcctgggttctttgggaaatgtgatcattttaaatactactataggacttgtattatgtttgcattaattactgtctggcctgttacttattttgcctttagcctagtttttactttccatcctctagtctgggtcatttgaggcaattttttacttccctttatttttgcctactagcccagtgttgctcaattctagatgtgtacacagagcagttgacagagggacacccagatggctctggtgagctgggccaaagtgggtaaatcacaaagaaaggggaaagaagatatgttttaagactgtacggagtctgggcaaaaaagtgagaccctgcctctacaaaaagtggaaaaaatgtgatggcacatgcctgtaatcctagctactcgggaggctgagctggaaggattgcttgagcccaggaggttgaggctgcagtgagctatgatcacgccactggattccagcctggatgacagagaaagatcctgtctcagaaaaa

SEQ ID NO: 70604 - DNA, 717 bp, Homo sapiens
attccagtgactctaagggttacaagcaacctgaactttatctcaaactatctctgcaccttatttccataatcaacgaggccaaggccaaaagggcagggctatgaggtgtcctactttctccccacccactgactacaaacaaagcagctcctctttatccattttatatactggtatttggtattccaccttagattgagcttggaaaaaagattttattactctaaagggtgggtgaaggggttaaaaaagcttgagagtaaccaaagggcatgtcattcagttcaaatgattggtctgatgttaatcaaagcaggacagcaggtttattctccacccagagaacttcttacagccactgctggctgccttctttaccctcaaaaatgccactgtgccaaggcctgagaagcgagtaaagggcaaaagataagctaattagctttatgtaaacaccaatctagtaaccctacccaggactgaaggtagatccttacctcactttattcaaaggcaacagaaactgaatatccaaaataattagtgggaagtacagaccaaaaaggaatgtaaacagtagagagaagatttcttgttttttttttttttaaatttagtatttattaagtacatacttatgagcggctcctctagccaagaaacagaaaggatccagatctctaatttcttagagaggaaaaaatgtgaatatat

SEQ ID NO: 70605 - DNA, 1170 bp, Homo sapiens
cgcgaaccccacagtgccctgagctggcctcaccctacccacgatcccaagagggtactagccgaggggatgggtactttgggggaaggcactttaaattttcaaagtgtttaattcacgaaagcacaacccaaagggccgcccccacccacccgggggtctcccgcctccgcccggcagccgctcatccccagtagaccagtgaatgaaccgcggggccgggacgcagccggcccagtggcgggaaaagcctcggggtgagccaggcctggctgcagagaggccccaagagagcgcggggagggctcgggcggccgggagggggcggtgacagctgtgactcgactccacgctctcaccttgaacatgtcgctggcagcggaggctccggcagggtcaccccggcctcggccacgcccactatagagaggtgactacggaggcccggtagggccttgatttctccaaccgcaagcaggcagcggtgcgggtgacggccgtactgcaaactcggtgcggcgaaggtttagttcaatcacccggttctagaagccgcgtcgctgagccgcagcgcgtcgcgcccgggcagcgggtgaacgcaaaccccgccctccaggaggctccgcccctgcgccggcggttgctaggcggcaagaaagcgccggctctgtgtggacggtacgcggaggcgcgaggagggaggcgcctggcgttgccgcggcgctgggaaactgtctttgcagcggcgactgggcgcccagcggcgtgtactgggatttctgtgagcagaggctgccgagagggggcgcttggagggccaccggcggcttcgaaagcttcgcagccggaagccgccggttggcggcctggatttaccttacgaaaggttttaaccaaggacttgaggtttctcaggttttaaatttaaactaatatgctgtgtcctttaatcggaaaaggctctgaccttattttttcccgttaagaaacaagcggtaagcctcctctctggaaatcaaatgtttgtcccttaatacttgtagaagtaactgataatggcaataattatcttattaacaagagtaaacaagcactgatacagcactttgatatgcgcagccctgatctaagttctttattcacattcatctaatctttccaacaacggaa

SEQ ID NO: 70606 - DNA, 2958 bp, Homo sapiens
tttctaaattaccacttaatcagattaacaaaggcaaacaaattcggaaaacagaaaagactaacaaatgtaaggtgttaaatatttggagtaagaaaaggggcctaaagcggcctagaacgatgaaaagcaaagcccctacggtaacgttacatttgaattaaagaataccgttatttaaataagcagttagcacttcgtaggaggaaggccaagcaacgtgactattacagatctatggattcacagcactgctttactattattccgtacttatttgcttatatttataatatagaaataaagaggcagcaacagttagccactacattaaccactctaccaaaggttacttaaaaaacggccttgcattcttacaacactctacagttaaggattattttcacatatatgacctcatatagtcctctcaaccctgcgatgttggtagtaccgactatatttcatagataagaaaccaaggctcggtacgcgattttttctcagagtcacccaagtcgaacccagaccttccgattcctagttttatgcctcgcattttgcatagttctatttcaggcataaattgaattgttaaagggaaggaacgggttaggcaaaaaataatcatggtacctgcagctgtgtgctgcaaaaaatggctgaattatgcttcttcctttttctttctcgctctctctggaaaaaaaaattacatttcaaacaatttaagtaaactcgaagacaaacgaggtcccggcgtctaccaaatgtttgactcgggtccgtgcagagagggccggcgaattcgtgcctagctcggggccgcgggcgaagcccgggctccgcaggccggcggccaggggcggctacgtacctcggggggtcctgtccagcctctagtggacggcagtctgcatcaggaagaaccgggccagcgggccgatgggtgggcggtcgggcgccgggacggcactcggcaggctcctcggacgtctacgagcagccgctcccggcacgagccgggtcgctccggcggggcacgagagtgctcgcctgcagccccctctggataagtcctgggaaagaagacagcgctgagtcgagaaaccagacagtcgggctccgcacgaggcggcgcggcgtcggggcccggaccgaccttgccaacgccgggggcctcgcagcacccgacggggctcggcgggagggccgactggggccgcgggcggggaaaagggctggggggcagcaggcagagacagaagcaccagccgaggaagcgtcgaggacggcgtctctgggcttctgccccgaagcgcgccgagcctcgggatcacccacgccgggggtggaggaaggcgggaaaggggcggggaaggggcggggcgtgcggggccacgagccgggggccgctccgggccgcgcgccccctgcgggccgcgggagccgcccggggcccgcccagggaggcggggctggccggcagggggcccagtgcgctgtcgtcttgacgcggaaggccgccacgctgggagagagggcggagggtgggaagccgttgggggcggggagctggcccgggaggcccccccctcggcccctgctggcgccccgagggggccagcccgtggcctggcgggtgtttaccttccccctggtcgagcgccaatgccgccatctttcagcccaaaacgcgtcacttccggcgccacgggagcgggagcgggtgtgggaacgggggggaagggggggcggggaaggctgtcccgcgcccgcggcgccccgcgtcccggctgccggcccgccacgccagcggtttcccaccgaggaaaacaggcggccgggcgtcgcggccctggactgggcccgacgcagcttcccccgcggcgccgccgtcggggctgaggacactcagctgtcctcgtccccttgcagcggtctctctccgcctgcacgagcgatgggccctgagccactgcggtgcgcccaccctcgacaagttgagggctaggaagccaggaaagtgtctttttgcatcttggccacggtgggggtgggggaatcggggacaacgtggagggagcttttccatagctacctgttataaaagtgactagatctgcgccaaatgacatcattttttgtaaggcaacttgcagtggactattgcgtcactgtccacttggcttactgcacaacaattacacgtttcagaaatcgatttcccaagggtgggaaaattcataaaaaattgcatgtctgcaccacccggagataatgccggatttaaaaaagctgtctctacttgcgtcaaaataatcaagaacgaacattcagagggcagtgatttttgttgttcgttttttatagaattctagctagtactttttaaatattaccttttcttgacaagaatataaaactagactataggactgttttgtaaatttattatggcatctctttctgggaaaagtgtagatgacggaaatacacagttggaagcccgtggatctacaattaaccttaaattagggcatccattgcccatagcagatcctaaactgaggtatttcggcttcccccacccccaccccccgccgccattttctctctagaccaatatcccgatgaactttccgtgagaggtgtcgctaaaagcgataattatctctttctagcaaacttgaacataccatctttcccaagaggccaaaatagcacacggtgtactgttttgctgaagtagactacttcgtgggagagataacacaatcacttcaatcttttggaaatacgcttccttattccgatttaaactataacaagctttaaaaaaactgtaagacactgaaattcccaagttgttcacactttctttccatcttttccaatagctcctttaagatatttctgttcattatttaaaaatccctgcttgccatatttgtatct

SEQ ID NO: 70607 - DNA, 1846 bp, Homo sapiens
tactatacttttgcataatagctgtctaacaagtttttatggaaataaatttattgcaaacaaaaaaggaaatagctgtttatgataaaatttgtatagaaatgcaaggagaaaaacaaatcactcaactgcttttcaacacgacgaaaagtgggttaaggtctcaaaattctttaaattttaaaataccgatttatcggtaatcgaggtttttttggatctgcttctttaagaaaaaaaaaaacaaaacacacacacacaaaccagcgaacttcagacgctcttacgacacctagctatattcactgggaacgcaatctaacgtcaccaaggcccacctcccgggccctagaaatcgctctctgggaacaagctggggactttgattttgctagccctgcccctctgagcccttcaccaaacttccgcgcgggggcgcccgccccacctcccgccggggctcagcacgcggccttctcccagccaagagccccgtcataggtgggcgccgaccccgagccgatctcgctttattaaattacagaaatcggtattcaaaaaaaaaaaaaaaaaagggcggggaggacactccctcttctctgttcccacaccctagctgattcccaggtttcgggaaactccacaggaaacggaaatggtctctcccaggccagcgcgcgcgccgggttgcatcacccgcctcgcacgggccggcggggcgggggtttggtggctgccctcagtattgcctgcacaaatatctaccaggtctgcgacgaatagctccagcaacttcgcaccgtgttttccactcagcctaccgacaggcactgtgcagattcaagcggagagatgtccaagcagtgaggccgctgctgcaccggccatcctgagcccctactcggccttcccgtctccgcttccccgccccgcactaggacccctgcagatgatcaggcggcagccggggtgatttccttcctcttttggcaacatggcgggcggagaagctggagtgactctagggcagccgcatctttcgcgtcaggatctcaccaccttggtgaggttttgcttggggaggatgcagagtgagctcaggagtggaggtgaccgagcctcccggtggtattgggactagtcagtgtcgggagcatgggtcaggagcctgggtcaggagggagacctggaactgggcgccctaagccatgctcgcgccgcctgtacccaggccagtccacgatctgggcgcaggcgtgtacggtcgtgggacttctagcttctggagggttcggctggaaagtcttgatgttgattgtcatggtttcagcctctgaacgtctgggaagggggtgtcctgtctgcattacttttagtgctaatgttcccaagattggggggatctctgacttccagatatcccctaatagttgagtggaggtgtagtctgttgtgtaatgatgaagggctcttaacagcttcccagccataggagtacaaagttactgatagggaaaaggagctttagaagtagtggaaagctgtgcagatggtggcaagatgtagatagcaaacgtaaagtcaaaggaaaagttctcatttgttttacgtgcagtgttttaaaatatatttcattgcaggatgttaccaagttgacgccactttcacacgaagttatcagcagacaagccacaattaacataggtaagagtaacttaagagacctaaccttggtctccaacaattaattttaacctcactttttgtgtgattacttgaatagtatgaggattcagatattcaagaaatagatactgagtccttgtgaataaagcatctgctacat

SEQ ID NO: 70608 - DNA, 1299 bp, Homo sapiens
cataaattcattaacatatccactatgtttcactccatagcaattttttttgacatccaaattttcttaatgttagacaacctagtaagcttggacactttcttcttttgctttctgctataaggagatgttcctggcttatcttatactttcctgctccagccctggaatcaatcacttctccctttcctttggtgggaaactgtagaggccccaacttggacaccaggggtgctcactgctactgctcattgtttctaggcctctatattgatttttttatctctttagtggagctagtttgtttgctgtgccctgtgatttataatccatgaagaatttggctattattttcaggaattaaacaatgtcttgttcgactaatgactcatgtaaaaagcactgcttgaaaatcacctatttgccagtcattgtttattttaaaattattctccttggggagagtgtgtggcttaagggctcagatgaaaaattcttacttggcattaattatggccaactgaattccaacagaagatgcaacttgctcacgctaagtataacctaagtatcaggtgtcagataaatggttaatttttgtagggcatgcttagttcaataaaactagggcctttctaggggaagataaatattttttaatgtttgggatacaaaaaaaaaaaaagaattaccacaactttattcaagaaggtctacattttctcataagccaataatttattgcttcttatttgaattcccatcagtctccgatgtggagtgaaaatcaacagcttcttttctgactaatctttctctggaaaaatgattgaaaggccttctatcgtttctggctcaaggacctataaacatgtcagagatttttagttaatttattaaaacactgtcaaaaccttgagtaaatgcttttaactatctgatgtacattaacagctctgaaggaacaaatacattttagcacgtaatcaaaattccttttactgctttgaaaccagctattttgtattcatagcattctcttttgaaatgttctgctctcgacctccctagataaaatttccttttattatgtttacttaagtgagaaaatgaaagtacttaggaatgtttttattttgccttacacagcctccttattcgagttccccaagggcaagcacatctttgttacttcctgtgcccagaattctaaaggtccctaatacgaaaacaattatcaaggcaagataggctgcagtaggtcctttaagtgcaagatgtctggtgcttaattaccaa

SEQ ID NO: 70609 - DNA, 3090 bp, Homo sapiens
tttttttttattgaaacaacattgcttagtttcatttacctttctgtgaaatgtctttctgtgaaagtctatcacagcctgatgtaatttttataaacaatgaatacatgctgttactatttttgaaaggaaatttaatcgcttggaaaaattcagactaaagccccgagaggaaaattatcatccagtgcatgctcagagatttcttcttactctacttttgtttttcctttttgaaagcatttgtgattgagagatgtctgagggaagggacaaattgcattctgggagttttaaagagttatgtcaggcaactaaaatacgtggcctctgtatttaaagagatttcacaccagtatactatttgctttataatttttgtgtttcttattgtttaaaaatgcctttaacatttagtgctgtgttaaaggatagcatgccagattccagattaatgtaaagactccactatttaacttttccctagtaactttaaaacagagtttgggttccaagttcagcatggaaagatagcataaacatttaaactaagtaaagtgcgaaatacacatttttgaagttggtaagtgctgtttaatcattttccccttctctcccaagtcttttgaaacttcaaaaggcttgtttaagcagtgtgtttaaaaaaaaaaaaatccatacccaattgggctcctctctattaaggaatgtggaaaattcatgatttatgaaacgatgacaccagtcttacatttcacaggctcccaagctctgaaacacgggtacataggaaaatacacagaaaattcctgttctttgcaacgtgcgaaacgtttcaaaatgcaactttgctcatctccctcccccgtacaaactaataaaatcagtttggctctgactgcttatttttaaaaagtagacggcctggtaggtgctctagggataacccttctccccccactccaccccccttcccgcacacccatttagactggcaagcccgttttcattttatttcaaagattttttttttttaagcgaaggcaggggacggcgggggttgctaaatttatcttcctccccagccacggggatgaagaaaacacatttactgcgggcgggggtctgagggcctgcaaacaactcgagctggagcctcggccaggaccggcgcgagaggcggtaggtctccagggaggcccccggggggcggccgcggcccacgggacatggtggggggcggccgggccgcctgcctctccgcggggtcggccgaccgcggccccgcgcgggctttacggccgaggcggcggcggcagcggcgcgtgtgtggcggcggcgggcgggagcgcggaggaggtggaaagaaggggggcgctgtcacggagactccggccgccggagaccccgccgcagcgaggccactgggctccccggtcgcggggcgggagcggcgccgacacggggtgccaggaggacccaccgggcggaggagggggcctgtctacccttccgcattttcctgggtctctctcccgggcggtgacgtgacgtgctgacggcgggcccgtgccggggagctgggccgctttttgtcagctccgagctcggcccctcctccctccctccgcccgccccaccagccggagcccggcccagtgctccagagaaaggccggcctgcagcacccgccaccgtcgccggccgcccgcacgtccgtccggtgagtcccgggtgccgccgcggccgcggggcctagtgcgcgcacagcggcctggtctcggcctggtcggcggcccgcaaggcgccctcccgcgctaggccgggcggcgtggcgcgcggcgccgagcaggccccgaggaggccgcagttaggcccggggaggagcccggctgccccgagcggcggcggaggcgcgctccgtaagcgggcgggggttgggggagggtcgcccggttgtgccggaggcggtcgaggggccccgggtcggctccgcggccgacctggggcaccgcgccggggtgaggcctggcgaggaggcgaaggctgcaggcgtgaggtgaaggccgcaggccggccgggccgattttcgctatgtaaatatcggtgagggggggggagggacgggggacaagatggcggcggctcggcgcctgctgcaggggacgatagagggggttgccgggagggggagccgccatcttggaggcggtgtctggagagaaaattccgctacagcccgtgagggggggtgggagagcgggcggcggcggcagcggcgccggtgacgggccccggaggcccggcgcggcggcgtgtgcgcgcggaggggcgtgctcgctccccgtggcggccattgcccttgccgccatgatgagcgctcgggctccaggcgctcggcggcagcgccaccttcctgccttgcctcccgcagccccgtgactggctgcagtttccgctgcgtttcagctgagctgccgcaggcggccaccgccgccgcccggacgccgggaccgtttcaccctcagcgcccctggccctgcgccttcccccgcgcctgtagccacccgagggcagtcggggcaggtggcattccggacacctgggcttaccagggcatacgggaccccaggaaatgttatttttgcttaagtcaaatcatatgtggctgctaaggtgctttcgatgcagttgtttttccaacaatctttgccgccccgagtatctgaataaaggaagaaaaataaagattgatgggaaagtttttgccattcttttgtcctatagggaaaaaaattgcacaacacgagagcggaggaataaaattttgaatcattcgtactcatttatgtggaaacaactttcttgaaaaacgatttaagtagtgatctgttggtggtatttttttaaatcgaggaataagggcagacttttttattttcttattggaggacaacttagtgtggtgcatatttattgtgcatttgcctgtcatggtatttcgatttttcatttgtgaagttttaaggcggagtttcatcccctaacgtacttttttgattgcacactgtgcaactttcttgataaact

SEQ ID NO: 70610 - DNA, 632 bp, Homo sapiens
tccatctaaaattgtatctttactgtaaactgaaatttatttagaaatcaacactacaattaatgacttaagagttttcagtataatgttcaatctaggtgttggctagctttataacaagaataaagcactcaaataaggcaaagatgttttagtttctcccttcccctgccaaaaacaaggttgggaaaaggtctctattttgaaagcattacaagcaattggagcttcagactggccttgtggttaatatttactgtttatctgctgaaacctagacaaaaatgtcaccctgccctttgaacagatatatgattactttgtgaggtaatgggcttggggagggaagagaaaaggagagagggagagagagaacatacctctccttgcctatcttagagaagcaacatctggtatatggaaactcagcttgcagctgagtcaggcagccttggatttggataccagctctgctactcattagctgaatgaattcgggcaagttaactaacctttttgttttagcttccttatttgtgaaatggcagcaatactgcttgacttccagggtggttgtgagaatgagagatcctgtcagtcactgctagctgttgctgtggttatcatccaga

SEQ ID NO: 70611 - DNA, 1040 bp, Homo sapiens
gatcagatggccatttattggtaatgctacttctggttatttggttaagacggagcatatatctttaagttgttaatcacacagccactgtatccagactgctgagaagcaaactatcaggcaaaattcagggcgcgcagcaggaggcagtcgctttcccggctctggggaaaacgatccaaccacgcccactctcctgcccgcccgcgcctcctttccgggaaaatgggctctgagaaccagagcgccctttctcccacgcgcccaaatcttttcccatcagcatgcgtgcgcttgcgcagtctccaggcggctcctttccagcgcccgaccgcttctttctcctgctctcctccggcttcccctcagctctagcttttccctaaggggtcatcacagggcgccaaacgcgcgtccgcgggaaggccgggggcggagcgcggcgcggcgcggcacgtcagtggccttccggccggaagtccgcagcctcccgagccgctgattggctttcaggctggcgcctgtctcggcccccgcgccagttttgggctggttggcgcggaatcgggagattcgggaccatggcacctgtgcacggcgacgactgtgagataggggcgagtggtgagggacaattccgcgcgcggggctccgggttgggacagtggcatgattgccggtggtgggggttctgagggaggcgcacacccgggtttgtttgggcgcagaccttggtcgtccccggcgggggcccttctggcgtcggaccgggcttcctttaggcgcggtttgctcttggaggaccagagcctggagggatttttgtttgggaggctgtctcacctctgccactgagagtctccacagtcgattgcgtttctatttcttttggtgagttgcacccacgtgctgggtataactttattgagactggccccgtggggccgaaagtatttcactgcgatctccctaagtatccacttgaaggcttgaacagaacagatctgtgtccctttttgtaggaacttccaggaaaattt

SEQ ID NO: 70612 - DNA, 1036 bp, Homo sapiens
caatagtaataattaatagcatttattgaacactaagcaccagacactattataagcatgttctgtgttttaacttatttaattttcacaactaccctatgaagtaggtactgctgttgtccctaaatgatagatgaggaaatggaggtccggagaggtttaaaagcctgctcaaggtaacatagcaagttaatggcagagtcaggattgcaaccccaatagtctggctgtagagtacattttaaacataactactgtgtgcacaaggctaatgatttatggattgcatgaataactaaagatgatgtccccaactttgttagagatatccccaaacttccttaatggatcggttgtcataacttcaccaacttacagctctttttttccacataaaacttgccaaaatgccttcagactgaagggagaaaaaatttaactgtttccttcaaattaaattttattagcagagaactagtattaagatcattgcatgaagaaaatgtaaattagccgcttactgtaaaatagtattagagaaggcaagtgataaacatgtctattcctctttttccctttattagtggttaataatcaataaatagcagcttaatgattaacattataaaagattacataagagttttagaagaatttagattttctttactaggtagtcatcttcatttttataaaactgacatcagtgttaagccatttttaccacaggttaaaatttgactgacctattctgttgctgactgagtcataccaggtcactgaaacctaaaataagtatgttgtaagcatcgcgtaacaattataacctatttagatccaagatccacttaagacatgttgacttcttttctgcatcactgagatggccgacacatccatcaataatgtgctgaagttctcattagctctctatacagggaaggatgccagcaaaatgtacagaagtaaattcactggaatctctggtcagaaattatgactgttctatatgtcagcccatgtgttgctaacagat

SEQ ID NO: 70613 - DNA, 1170 bp, Homo sapiens
gtatagcattattgaacagaccttccagaaaccgtttgtcttacttgaaaaagggtctctttcaaaaggaaaactcatacgtttaactagtgacaataaagtagaggagaggatattgatttttttttttttggaaaccaagcacacagtttttattacagttcaacaaaattgccaatatccttcttaaagcattttaataaaattgacatccttggcagagaaacagagcaagtctttcattttcagacagttgccactgggggtcaccattacaattgctaagctttgcctgcagttccagagccacggcagcaactcgcctaaaatgacggagaagatgagggaaggactaatgtctttcaagcagctttttttccttagtgtcgcatggaggcattgttcaaagataagtatttgtgttttgtgggtaggatactcacctgtggtaagaaggggttcaataaattgtctgtccaatagataaaacaattcttcatagttatagcttatttctgaggtttgtgccagccctcagagagggtgatcaatatgcacttttctgctcttctgaatttttcagaaattaaactaggatttgtctgcagcatgtttttttaaatcactcaaccttgttttctttattttatgagtatatcaacccttactgtcttattagtcaatacattgtttctgcctagaaaatccctttagctgtttgcttcttacatattaaatcactgtcattgccattacataagggaaatcaaatgaataaccaaaccaaagccagcttcccctagagtgtgagtcatcataggacaaacaggacttttggaccatgtgaggatatgtatgtataaattgtgcaatacaggcactcaggagaagcaatccgggcaggagagggggccatgacagcagatggcactcctgactgtgtcttaaacagggtatcttaactattgggtggactccacttatgtttaacttctcccaagtaaagcatccctttccgtaaaattctcttgaccttcattgttcactcagtacatttaatcaacatttcccaaatattcccatggtaaaaactatggctaaaacaatacataacacggaattactgccctcaaggatcacttcctgaggtgtgacttgtgcacacggggc

SEQ ID NO: 70614 - DNA, 703 bp, Homo sapiens
attttgggagcactgtcttagcaaaccaataagtgtggcagagatgtaaactcaggtttgtttatttccaaattcaatactatttccacatctaaccctctgtcacaggatttttgaagatcaagattaggtgccaaggagtctagagagtctaatcaggaccaagttgaatagatcaaatgtgaccagtcatgcctagaacaagcacagcaccatggaataggaggcaagccatgagaggaaagaagtgtgatggttttgaggcagagaaaatgtaatcaatagagatgtcaaagtataaaggccagagcaaacaaggatttggagacattaagcagcaatcgatacagagcaaacaaagatggatcatggagtgggaagatgaaaggcagtttaagaaccagccagggacatatcccacttatactgacagcaggtcttggaatcctctcaatgtgccaattgtcaaaatccatgataggcagaaagtgtcctaaaaggatcaagactattgtttaaaaatccatcagtgattcccaattccttcaccggcagaaccagatccatctctttgctgcatgccagacttgttactgtcataaactgtttgcacatcttcaattatgccatggtttttcagacctccatgccctttaccagttggatccctttcctagcatgcatttttgcctcttcttcttcc

SEQ ID NO: 70615 - DNA, 563 bp, Homo sapiens
gatttgattcatcacacacccacatcactgattaataggattcatttggaagctacaagttttaaaatagatttggttttcaccaattcagggggaaaatgaattccataaatggaaacacttcatgggaaacacctgatattgagggttatgtcatcatcaacttaaataccacagttatttcaacagctgagtcagtgcttatgaaacatattagctggaatgcaaccaagaccataagcttctgaatcactaaattaagagcatctacttttattagaatgcagaagcaaacaggtagcttcttcaaaacccaaagtgacaaaatagtgattatatgtaattatctatattttaaaatgtggctgtttgcattcaccttttagtgagtcatataatgactcaccacatactttctttaaatgataagttccattaatgattccattcacacatctttgattcatccatataatgttaggaacaaagctattctctatctcttacatatatgtgtttatgtgtgattagtacattgcctctctcttccttcatctatgtat

SEQ ID NO: 70616 - DNA, 1328 bp, Homo sapiens
ctgaaggtcagcctctgaggtgcattaattcttccaacattaactcttgtaaaaatgtcactttattgttattaagtagaggttcttaaaaggcccattaactctggtggctacaaagtggcacatcaattataaatttgttttatgtaaacggaacccccaaatgacaccatcaacatattgctttgtacttaggatcaaaataatcaaagccactatttgaaaatgtatttgcttgatttctcagacagaatctggggatagctgagcaatcatatctcatgcattgaagacaaattgcctcagtgaaatttctattatagtttaagaaaattatcttcctgaatttgacacactgaggtggctgggaatgtagttatccagcaacacctgcttaaaatgccaataggaggtatgtggtaactttgttccactcagttgctacacatgacctttggaattgccacagctaccttacagcagagaacagggacgcacacagggattttcagagaagcactaaggaaaatttgaaatgaagctaaattcaagaagtaaatgatacttagaccttttgcaaagaaaacccagagattttaaaatagacaatagcatgacaatttataaaaatgaagctatttaaacagtatgatgtatagtattcacaatagcttaaaatattttattcccaggagcaacctaatccataactttttttttttttgctaaatgttagatgttgatatttgcaatgcattgccttaaattggaagattataacaaatttgtgtattttatggtgtactgtctatgtattgtctcacagcagctttgattcacttccatattaaccttgataatttgcttctttcaacattcaggatgaaaactacttaatataattaagttggcaaagcctgcattttggcattttatcccactctacattttcttggtactgctttttctaccctcttaatttttacacatggaaataactcatgtgcctcattgtaagtcagtgtgttatttgccaagagatattctgcatgaggtctctaataagatattgaaagaatgaaaggcattttcttattggacttgcagtcatcagaatccacagaaggggtaaattacggccaaagctttacagggtaatggttaagcatgcagaattggtgcctgaatgctcgccttcagatatttgctgtatgatttggggcaagttccttaatctctttgtgctttcctttttttttttacttctaaaaagtgatgtataaatagcatttagcacaatccatctagtacactgagaactctttatt

SEQ ID NO: 70617 - DNA, 1135 bp, Homo sapiens
tgcctcagtttatatttctgtgaatagtaaatgaaagtttatagactcctggcacatcgttaagtgcttattagatgttagatataattttaagataataaatgtggataattaattccacgttattatgtgtcttctttgctgtaatgtacatcctccttttcatctagaccatttttcttctcttgaatattatattatttatcctgttctcagagctgttagattgccctcttattaatttgtagtgactttaaccctgcttgcaatattcaaatgttattactgtcagaggtcctgttttctcagtctttgcccttttgctcaacatttgtatactctgagtaatgccaaattgattttcttgctaagtgttgggcaactgccctctctaaacagtaaaattcacaacttctctgtgatgatgataatgttgatgtacctgccctatggggacctgttgttttgtatgcatgtgcagggagaggggtgatcaaaaaatggtgtcaagatgtcatttggaagatggtacctgcagaaaacacagaaaacccaatcataccccacccccatcctccgcatttcccaccatggtttcttgtttacacttctccgattctcccagaagtcagagcaaagtgactgtttacctctgtctctggctgggaaaaaaccactcccagagctcaactcacttttattgatttctatattgtttggctgtaaaacatttattctcagttgtatcagtttgggtccagttagagaaaaaaacacagtcatttgaacagtgaaagtttttacaaataattattaaatgtaacaggggattatagtaatgaagggattggctagcataaaagaaagatgtattagtttgctcaggctgccgtaacaaaatactatagactgagtggcttaaacaaaagatatttctttctcacagttctagtgactgggaagtccaagatcaaggtaccagccaatttggtttctggcttttggatggctaccttcttgctctgtgctcacatgatctcttttttgtaatcacgatggagagaaagagcaagctctctggtgtctcttcttataagggcactaatcccatcaagagcctcgttctcatgaccct

SEQ ID NO: 70618 - DNA, 600 bp, Homo sapiens
aggcagtaccataaacagtgttgagcatatttgatgcctgtttaataaatagttgtttatgattatccgatattaagacttagactcctgattgggagctgctttcagttaacataatacagaaatgaaacctcatgtcttttaggaaacatttctagattcctctccagcctcctctgaattactttaacgcttgatttgaatgactaaaactggaacatctttagaaggaaactagagttgtaaatccctgggaatgacttagggtaaataaacaaagacataactcaggtccagaggccaaaaactcagagttcatgttttcaaatattggccagtctgtctttcatacagctgtgtcagctaattgcccaatagcaacctttttgtttgaccatagcaatctgttcgtttctctctctctctctctctctctctctctctctcagcatttactgatgactgtaagtatctttaggtatatttatcttttctctgagtctgcagggtcccttatgatactcagtaactgtgctctcttctccattgcattcttattgctgagtataatgcccagcacttagtaggtgtttaatatat

SEQ ID NO: 70619 - DNA, 2019 bp, Homo sapiens
gaccacttccctttgggggatcacaaggagatgagtcatcagtcactgccttacatttttgaaatataaatcaacattgaatagtaaaattagccttatggataaaaagaggtgactaaactgatttataaaaacttgtctctggataattaatccaccctaaacttgcttctcttatgttgtctccacatatggttaaatggtaccaccattcatgtgtttgctcaagctcataactagggatcatgccccttaactcatgaacattcgtttataattcacatctagtcagtcagtaaattttgttagttctacttaccaaatagatacttaagggaaaaaaattctaccacttccaccaccaacactgtgccgtcgcctttcagtggactgcctcaacatcttcctccctgccttcctgcctccattctgcctctctgcctccacaccacttcattctcccagacttgaacaccaaaatgccagagtgatacctctggtacaaatgctacttggggctctcttatttttaaaactctccaaagcattcctcttatacttaaaataaaacccaagtcctttccatgttctacaaggcccttcctgcattggccagtggctatctttgaattcattgtcactctttttttacatcattatagatacagtggcattctttgccctctcttaagcatgccaagtatactccatctcagcacctttgaacttgctcttccctctgcctggcataaacatcctccaggttttgctatgactcacttcctcccttctcacagatatgttccaaatgatcatcagagcaagctttcctgacagttttttctaaaatagcatttacattagtctctatctctttagctgctttaattttcatagtacttataatcacctggcattatattgtgtgtgtatcaatttatatgattattttgcatctccttctctggaatgcaggcttcatgaaagcagaagttttgtctgtcttgttcactattatagcccctagtacctggtagagaggaaatattttaaaaatattttttgaatgaataaatgaatatttttatagtttaattacaaaccacacttatcaaattaaatgaacaaaatactaagtatcaaagctagccaaatgaattccttggctttcctaaatacatgtcttttgatggatatattatgagttacttccttggaagtatttgttctgtctccttggcatgactcttaagttaccttgtatatgttgttagtttagtcatcaactgacctccccgcacctttctgttcagttgcttagtcactcctcactctttgaggctcctgaggctccatgactccgtggttagtcaccacaattatttgcaacagaaaggagaaatgttgccaaccccaaagcattagagataagtgaaaaatagagcacccctttcaccccaagtggattcacctagtaaatgttgatgttttcttctgtccatttccttcttctgcaaggaccatgagattgtgtttacattctacagctctcacaagatgtatgctccaatattagaaactaatgtttaaacattccaggccaaagaaagcaaaactgaaattccactcttgagtcattcagaggttgaagcattatgggtgatccaagttcccctgactatctgtgaacacaggcagttgtttgtcaattcttttaagttaaaaaaaaatgcacaaacaacctattgtaaaatggagtgagtcagtgcaattgcacaaagcatgttttattgtcagctgtataaatctgtgaatatttttcgtgaccagttttagttggtggatttaaatgaggtcaccaaaaagttatctctgagtatagcactcgccacagtgcatcataaatatgctctcatctatgaacatccttatgaatgactctatgtcttactcattcttttatctctaaattagtactgactattttaggtccttcataaatgcttttgaaattggatt

SEQ ID NO: 70620 - DNA, 2491 bp, Homo sapiens
gaagactcactgaaggttcagatcttcattagcatttttagcaataaagcattttttaagcaaggtgtgcatgttgtttttgagacacaatgcacacttaataaacaacagtaagtacaattttaaaatccagtaggaaataaaaaaatctgtgtgactcaccttactgcaatattgactttattgcagtggtctggaaccaaacttgcaatatctcttaggtatgcctgtgtatgaaaacctagatgttctacctcaacatgtatcagctcagcatgtttttaaaattcttcataaaacaggaacacatttattctgagtattcaaagcactaggaaccatttcctgacagagatctgatcctaggggctcagtgagaccagtgccattgctgaattgtacaatcgtttattttctttgtggagttttgcttcttgtgtctcacaggcagcagctctcattgcagagcaggtatctcagagattgaatgaagttaacccttttctgtcattacaccattctaaatatttattcgtcaagcttaattcctgtcttcaaaattgtacatctcagtgctcccagttttcgctcacatactcaccatatgcttgtctgtaattattatggctcattgactattggtatttgctggatgctttcctcttattttgcttaattcctattttttaatctttagtgctttttgcctatctctgcttccatagtgtttattttgagctcatagcttattggtttctcttttcatatgtcattcaaatttttttctataggcctcacagagttcttacacaaagtttagtcatcgatatccttcagaaaatttgtcaatatttgattaaacatccaaaaacctagatcgattgtttgtttaagttaatgtccagaattgcattcaattcatatgaatagtcactacatatcagttttgggttaatgaaaacatttatacattaatggtcaatattccacatgatcacttaatgagcattagctgaagtgtgaccacgaaaactagccctagcaaccccttgagtaaagactccagagttttatgttgctgtgccatgatgattcatttgtatgagtcatgttttcagcaatatttttctcctttgtcatttcaaattgttggtcagcctttgtcactgtgactcatggatttttacaaaacacagagagatagaatggctaaggtcattggctctccctgtcctttgtaaaatctcaatctattaaatgatcattttgcctgttccacagttcacatggggatagagggagatagattttgaagcagagaagggaagaaaaagaaagagattaaaatttggggctgaggttggaaaaggaccacaggttgagggtcctggtgagagtaagggaacctatatatagttcagaggctgtcctccaaggagatgacaaccttcagagggatggcttgtgatgagctcagggaatctggacaggggctcccagactcaccaagtgagtcacaaacatgtcttagaaacagtgaaactatctgacctgaagagactctgaccaagccttaataaaggctgaaattgcatttcccgccagcctggtgggctgaagcttgggtttaaattctggcttaattttattcaagcgggacaaaaagtgaatatttcttgaatatctgagcttaaagagtaagattcctccctacaacatatggaagttaatccaaaacttctaagaattctcatgctgtatgtgtctacatccaggactgattacaatccctcttaaacaagtggcttccaagacacccatgcttatctgcatcaagccagcaggaagaggaaaaacatggaggatatcaagtatatggtctgtatgtattagcttgaaaatagaacatatcacttctgttcatatctcattgtctagaactccattgtatatccaatagagcaccaactacaaggtaagaagttatgctcagtgatatatcctatttatgtgtctgggaagaagaaggccctaatttgtaaagagatagacagtctctttggaatttgttcttctgccactatatattcatttttcttccctcatatggaacacattcacttccctcctcaagcaactgaaagtctatttcactcacttcatccaggtgaacatccaggacttctgagtgatgtgcactcttctccatatgatccagatacactttggttatgtaatgataaatcaggggcagaataaatgtcataaaaacttttatttagaatagagaaaaatgaaaaacccctagcagccaccgatctgtggcaattatgaaatcctgctgaggtacaagacatttcttgattagaccctgaatctctatctgggaaaaattccccggtccaggtctactgattgaatttcccaatcacttttcttgcagaaacatacatccgtcatgctagtctctacaaaaaggaatgagaaattg

SEQ ID NO: 70621 - DNA, 1085 bp, Homo sapiens
ctcatcttagagaagctatatatatataaagctatatatatgtaaagctatatatattacatataaaatatacatatataaaatgtataaaattctccctgattggttaggcgtgaaggaaaagacacctgagaatatttgcagaggagatgttataggcaattttagcccacattaatcattaacagataggggaatgccaaaattaaccttatgtgcaaattcacaacttagaaatatgtgctaaagtgcagtgccttgttaaatcatttacttgcttttcagaagaaactgcaatgtaagttctctttctagatgagcatttagtttttcagaaagctgttgttatcacttcttcacatagacacatttttgattgattttttaaaattgacagataaaattgtatgaatttctcatgtataatatggtattttgaagtgtgtatattgtgaaatggcaacatctatctaattaacatatatattagctcacagttattatttttgtggtgagaatacttatattcagtttcttatcatttctcaagaatatgatagatcatcaactgtagtcaccatgctgtacaagagatcctttgaacttattccttctatataactgtaattttgtatcctttgagcatgctgatcaaaggacacacttttaatttacatctaaacaacacaagcgtggagtcaaagagaaaacctaaggaaagaagaactttataagggggaacgtttaaaacacctaagttagggatcagcaaactttttttatacaaggccagagagttaatattttagactttgcaaatcatacaaactctgttgcagccctgctggcctagcaggaaagtaaccatagacaatatgtaaacaaatgattgtgtctgggctcctactaaagtttacaaaaacaagcagggggccaatttggtcctgggctgtggcttacctacccttgacctaagtcaaaaagcagacgcaataaatgggatacgcatcataataatgacagctgtatgccgagtgctttccaggcatagcccttaaccttccaacaacactgcagattagata

SEQ ID NO: 70622 - DNA, 526 bp, Homo sapiens
tgaatgctctcacgtttgtgtaaaattatgatcaaataaatttgtgtctgtcttttgtcggtgattttcagcaaaccttcagagggtgaagggaatgttttcccttggtccctacagtgtgcaacttatagacaattgccaatgaagatattgcctttctttgttgtgcatttcacaaccagattatgtaactttttcacggtatgtcatcatcagcagcaacgtatttaaataacatgctaagtacacaaggatacttggctttttacttagtgtgatttgaagtggactttgttgcttcctgtctttcctcttagtgggtagaatgaaaggagaagagagaaagaggtagggggtgacaggaatgttcttataggcctgcttggagaaaggcatgaacgtgctccctattcatccccccaacccaacacccacgcccacattacataagcagctccattcagatgaaagaagctcattatattgccttgaaaatgacacaataattgtgtgtctctcagctgcc

SEQ ID NO: 70623 - DNA, 784 bp, Homo sapiens
cacagctatggagtgaagaactattttgctgcaaaacacttcaccaggggatgccacagaaagcacaaaacccttccatgaaatggagcttgttcctttaaactttggaaccacatatctgtgaatcataagttaaaagtgttcactctgttccctattcctgaacacatatgccagtctgagtgcccatatcagtgtgaaattggcagactggagatctccaatggtcaaagcaatatgagctctgtctcctgtagaatatgcaagtcccaaagtatctaacataggcactacatcaaagcaagtcgtcttcaaagcaagagacatcaccccatttaggagaagagagagtcataagaggagaattatacaaacatatggtttccacattgcacaaatacaaatttacaaacagaagttatttcctctttaaccaggttcctcttgctatgttgcctaacttcaaaccaacagtcatgagatcatcatttccaggcagtcagacacaaactacgaaagagaaaagttccatttgtgtactgtaatgtctttaaccagcaatcatgggaagggatatgcaggggtgggggtagagaagttaaggtacatttgaaaatgtaaatagaaaatgtacttgaaattgtcctgaattgcacagatttggcggtcaactgtttttaaaagaagaaaaaaattattctacttaagtcagtgatttcatgttgtgccaatagcttacaaaatacttaaaatagccttagcttttaaaaattagtaaattagg

SEQ ID NO: 70624 - DNA, 1338 bp, Homo sapiens
cttgggaggctgaggcaggagaatcacttgaactggtggttcaaggttggtggtgggctgaggttgcagcgagccaagttcaggccacttcactccagcctgggagacagagagactccatctcaaaaaaaaaacaaaaaaaaaaaaaaaacaaaaaaactgaatcccgaatctgtctttaactccctctgctaccttgggcaaaacactttgtatatctgcttaaatcatcccaatcccataaaataacaatgtgcctgtgctctttactatagtcctttccagcactaactccacgttgtacttccaatattcatattaatccatatccaagtaatcattaaactagcaaggaggggttaaggaaagggtagctttccaaacagactaaacttgaaaacataagtgttacttctcaggcaaataagtgaagaccaagaagcacttctgggggaaaagggggtgcagagattctcgagggaagtgtaggctttctgcttacataaattctgtgtaaatcaacaaaaaacaggaaaaaccagaggaagaataagtgaaacacctagggactctccaagagggaggttaccattgatttcctgctttaccagtcagaaatcatcacagtgagctttaggtgactcaagctacttaatttgcatgaaggaccttgatcttcacctctgggtttctttgatggagataggacagtgagactgcctcttgcctttcatgattaaccgttctgcttgtacagtgctttagcaggcattacatcatttaagtctcacattgacccatctacgtcagtgacattttccctattttacaaacaagtaacaagaagccatggaaataaatgagttattactcaagcccatgatgattaagtgttgaatggcagggccaagatcaaaccaatgtccttctcttcccagtccagtgttttctctattgctttgccttcatatctggggtgggtggtgagaagaaggtgaaccagcatcctgtcttttttcctttttgtttggtttcctacctaacttccttcagcttcccttccctcagactctggtaaaagggcactaggtttgatgtcaggagactgaaattctggttctgattctaccacaggaggctggctagtcttaagatgtatgtcacttatgcgctcttggcctcagaggccccattgttattaatacttccaactctgtctcaattatagtaagaaaaatggaatcagagtgtctattggttgatttttacaattatataaaggttttggacaatagctggggcttgagggagtgagaaaagtcaagcaaaaggggattt

SEQ ID NO: 70625 - DNA, 3306 bp, Homo sapiens
aatcagcattaaaaaaaaatgatatgccatagaataaaaatacagaatgcatactgtggaaggacaaatattgttttggaaagtttttctatacatacataaatgtatattagatgtatataacatgtatttacatgtgtaacaattgtaactacaaatgtgctccccgcccacacacactggagcctgggtttgttttgtaaactgtttcacagtgtgggtcttggttccaagtttgaaagcccttagaacacaggatccagaaggatccgggcaaggtaaattcaaggtcaagggagagtcccttttctgtcccctgccatccaaagcagttaatggagggagaggaaatggcgtgtgggggaggggaccgcagagtgaggccaaacgaggagcaagggcgcgtcaggacggagtggtgccgggcgccttctgcctgaatggtcgatagaggaacttggggaggttgattttgggtgctttccttaaatgctaaaccgaaagaacttccgcgtttcttgtccctgaaaagcttgcaacggtgaaggattcgcgttgctccttgaggtgaccctatatggggtcaatcccagccaaaggaatgattacgattaccaggggccagatgcagggaggtgggcggggcgtgggaaacgcgggaaggccgggccgggtaggtccacacagcgactcacgtcgctgcacgactctgcacagcccactggagggaacaagcagttctacacactttgagacccctatggaggcgagccccaggacactagtggaagtgcgctcttttcgccggccaggagcgctgcctgccaaagggcagtactcgtctccgccccatgccatgcagctggatggctctgctgtccgctcgccgggcccccacgtgacctactgcgcgggccgccgcctccaccgcgcccaggccccgcccccgtgacgtctcatcgccctctgcctgtccgagcgttcggctcttttgcgtttgctgattggccagcccaggtgacagcgcccacccccaccccccctgacacgcccctggagccttgggggtacgcggtggggggcggggcctgggccggaggggcggggtgagaaggctgcgcgcgggtaaaggggccgcctcgagcgcggtccgagcgttcagcggacgcgcgcggcctcgatctctggactcgtcacctgcccctccccctcccgccgccgtcacccaggaaaccggccgcaatcgccggccgacctgaagctggtttcatggcagcctcaaagaaggcagttttggggccattggtgggggcggtggaccagggcaccagttcgacgcgctttttggtgagcccggggtgacatgtgaagaggcgctgagccggggcgggagtcgggggacggagggggtggctgttgtgtccccatcccgcatctctccggcccggtgccccggccgctgggcaaggagggaggccggaacgggacctgccacactggggatgccccagccaggcctgggggacctcggcctctcatgacccccatggccgagttgaacagtcgcagttttggtggcggagctgggtcacctactaatggggtgactcttcccccaaagggagcagggactctccgagcatccgcgcagagcggcccgcttgcagtaggggacaggtggccacattgacggctaccgcggtcttccccaggaacatttggcctgcgagacacaggacgtccttggatggggggaaagctgtgtcacggctgtggtagctaacacagcgtcctttccagcagtagaacgaataaagtattggagtgatgatgcgttgtcatcctctcccataaaaattgcagagggttgaatactggggagggtggcagaacaaattaggaaacagtcacactacactggttttgccataatctttatttaattccgaagactcgcaaatttcagttctgagactttgcccattacaaacaaatgattgtccttactgtgcttcacagcataatgcgacacggaaattctgtttctctttttatttaccatgtgtgacagcacagttttaccacaaaagattgctatttaagtgactgctgattaatttttgtgcaattagtaaacttgctcttaaagtgacctagcacagagttcagtaagataatttaaaagtaattgaggccgggcgcggtggcttacacgtgtaatcccaacagtttgggaggctgaggcgggtggattacctaaggtcaggagttcgagaccagcctggccaacctggcataacaaaaattagctgggcgtggtggcgggcgcctgtaatcctacttacccgggaggctgaggcaggagaatcacttggacccgggaggcggaggttgcagtgagcagagatcacaccactgcactccagcctgggcaatccagcctagccaacagagcgagactctgtctcaaaaaaataaaaataaataaaaaataaataaaagtaattgaaatgaatgcctgctgataaaagcccatgctttcaatggatatttgactaacttggcaagttgatgtaaatatttaatgattatttagctcttcactttaccgcaaatcatgttttcctgtgttatttagtatgtatatatctgtacatatatacacatatgtgtatatttatacataggcattatacatacaatgtatatattttttcaaagttctgtcagagctggcacttgactaaaaactgcatttgtgctttgatcctgacatatctttttttgtctaaagtgagaagctttcagtctaattttggtttgaatcttatttaatgacttaccctggtttgagctgccaagcatagttccactgtctcttgcactgtttatcttttgatcacccagggcaggtttcactttgtcttatattcatagaaatgtttatagagtaatcctgaatcataagaaagtttgcttaactggatttgattaatacataatatacacgatcatcatcttcccaacttaagaaagaccattaagacatgtgccaactaactgtgggttgatgtttaaagccatattcaagaattgcccacacaaatgcctgcagggaccaggcaggtagaagggggaaggcagactagagagatatccaggtcaaggggacagctagtagctgccaagcaggaacacaagcccagtgctgccagatcgtcagattaaaagcaggtagtctagagttttcaatgaaatctttcaattcttaaatgttggcaattagtttataaagcactgtggggg

SEQ ID NO: 70626 - DNA, 631 bp, Homo sapiens
atgggttgtttcaaacacaccagtatgcggagaacaaccagaaaagctggatgaaaatgaaataaaattctgaagaactggaaggctaccaaggcagtgaggacagaaggaaagcccagagacataagcctagcatttggcattgcttatctcctggagatatcggtaggttctgaaaggagtatctgacaggctaagccacacttctgcaggtccataaagataaggaggcaaaaggtgaagtcaagggctgccaagggtggggatgagtgttggtaaaatcccagactttggactgggactgtgaaaggtcaaatcctggaagtgaggtaaactgaaaataaaccaaccctcacaggaattgaagcccagattcaaatgatctttaacactaattggattaagatgatctgagattgctaatgctagtggcctaacttcctttcagaaataagagtaaatcctttctggaggaagacaacatcatctagagcctcaaataatctctagaatttttcatacgcattatctagttttctatttaaaaaaaccatgcatacaaaacaaaacgtgactgaaaagcaacagaaacaagtgacattagaaacagactcaagaaattcagatatta

SEQ ID NO: 70627 - DNA, 825 bp, Homo sapiens
gtatatatgtaaaatatattattaagtcttattgttttaaaagttttctggttatgatcattagtttatgatttggtatactctctggtttttaatagtttaaatgtcatttttatggaatataaaataaacagcatagttttgggctaggttctacatacaatactaatttattgcaaaaatcaacatctacattgtcactatctaattacaggatgttgtgtcatttaattttctctttaccttgctacgtggatgccctttgaactgtaaacatgtcaccctaatctttgttcatgaacatgctttcctgtgccatgagacaggaaaagtatttttattcataatactatgggattgccttcagggtctttgaatattttgtgatttgttgagttcttttgtttggtggttttgttttaaactgttacacttttcatttgctaactgaacttcacaactgttttagtccaagacaggccttccacttagcacttacttcagtgcagtgaaacttcgttggctccttgacaatgtgagaaaagttcaaaaggccgttgaagaaaaacgagctctttttgggactattgattcatggcttatttgggtatgtttaaatataatggatatatggagaattttttcagaaattttttctagactgccttgcctattgtttctactagcaggtcagactttttaattagcagcattatgaagaaaaaccactcaaaaagcaacaggagaagttttcagcttccattcgagaagcatttttgcctacttcctctttattttttcttgtcttacttcagtgaaaatgaa

SEQ ID NO: 70628 - DNA, 661 bp, Homo sapiens
ttaaatactccattgtctgagtaaacaaaagcagagtgaatgtctccttaaggctccaaagaataaggtaaagttctgtttcttagatttgcaaagtacttctgtcgagtcacataccttatctcactaactcttacaacctttggagtatttggctggattgtccctctatggtgctcagattgagtttgaacaaggtcaggtggccaagatgaccaggaccagtgctcagatcgtgggacaccaaggtcagtgtgcttgcttgcttactgatgaaggttggggaagctgtctaagcccactgaagagcacacatacacactgtattgtttaactacaaagtccaatctaccactgttatgagttactaataagggttgggagacattctaagcccgctgaagagcacgtacacactgtattgcttaactacaaagtccaatccaaaaaaggtttgtttctctgtctctttctctctctttccttctgtctccctcacattctttaattatcacacttagaattcagataaactatattaattacacttggatttctggtatatatctgtaataactccaagacatttatttattcgaaccaataaacctattctaccagtaatttgtgttttactggtttatcttttttctttttgtat

SEQ ID NO: 70629 - DNA, 2539 bp, Homo sapiens
ggggtcaggatattatatgacttacagaaagaagaaagcataatatgataaaactgggaagtcagtgagcatatgcaggcaagagttacctggccattatagctgaaacacaatgctgtaatattaacagacaaagaacatatgccattcaccaggtgtgggacgacagacgagttacttaacctcttaggcccagtttcctaatcctttgcttaatatcacacctatcatatacttacctcacaaggctgctgtgggttattaatttacatagaaggaaaaaagtttgtaaagcacaatgttcattgattaggttgtttgagggttctcatatggcagaaatctaggaatctcagcagaactgccttttttttttttcctatttcacaagggcagatatatattatacctacatataagtatgctaagacagaagatgtgattgcaaaagtgtaactaggaaagtattctcttccatgagaggaaaaaattttagttgatattatgcatcctaatttcaatagcaattaagagggatttcatcttttgagtcattccagacgtagctgaaatttaaataaacctgtccattgtcaaggtctagcaattgaccaaggttgaagagacttaaaatattgctgagtgttcaggaaacaatttacttatatttacgcacatacaatgtaacctttcaattaaaaatgtatataattatacaagtgagtacagctatataaaacaaagcttaaacagaactagggctgagtctgaagtcttagagaaaatgacagtctttgccacttctaagaaaatcctgcccataaagagcgaacaaagcacctccctatctgaaggcaaggaatagggttggtcaaaatataagaaatgcctttcttaaaagtgtcaaagagccaaaacagaaggacaaaagggaaaatcctcttcacccactttcgggttgggaccctgaagggctgcaacttagaaataagggtgaatcgcaatgaatcagttcacacactgaatgtgatgtggccttgagtcatctggttggcccaggaaggtctctaaagctgagatttgattaagcaactctggattttctggattcccttaagcagatgtacacacacacacatacactcctttctgaaaaactatcatccttggtttcaaatgatttttcaaataatttttcaaatacaatgcccagcatgcaattaaagacaatcaggcacacgaggaaacataataagatgaccagaagagactcagaaggactccaagtattggaattatcagacatggattttaaattatgcttgctatgttcaaggagatgaaagccaaacttaaaaatctcagcaatgacctagaaatcataaaatgtgacacagcagaatttgggtgtttttgagaccgggtctcgctctgtcacccaggctggaatgcggtggcgtgatcacggctcactgcagccttgacctctggggctcaggtgatcttcccacctcagtctcctgagtagctgagactataggcatgcaccagcatgcccagctaatttctgtattttttttttgtagagatggggttttgccatgttgtccgggctacacagcagatttttaaaagaagcaaagaataattttattactgagaaatgcaaaaaccgaaactaagaattcaataaacaggtctaacagccaatagacaccgttgagacagtgaaccaaaagataggtcgggggaaaataaaacgctcagaatgaagagagggtaagaaacatggaagatacagtgagaaaggtctaatatccaagagttaatcagaatcccagaaggaaaagagacagaatggggcagaggcaatatttgaataaatgttccaaaaatgatgaaacctgtcaaaccacatgtgtaacaatctcaatgaattcctaccagacaaaggaaagttttaaagcatcctgatggaggggcagcaggggcagaggtggggagattactttcaaagaagcaacagttagattgatagcttaattttcaacaacaaaaatggcagctaaaagactgtgtatctccaagaagcatgaagaaaacaactgccaacctagtattccactgaggagaaaatatccttcaagaaaaaaattaaaatacaggctcagacaaataaaaacagagttcatctccagcaaaccctcactaagaatgaagcaaaagaaaactgcctcaagatggaaggtcacagatagagaaaggaatgaagacccatgaagttcaaataagcacgtgaaatctaaaggaatattgactgtataaaataatgtcttgtaaggtttaaaatacatacagaaaattaaattacaggacaacaatatgtatgtcacaaggtaggtaaatggaactaaggtgctttaatattcttgcttcaactaggaggaaggtagaagtatcaattaacactagactttgataagtgaagaatacatgctataaatgctagggtaatcacaaaaagaataaaaatgaataa

SEQ ID NO: 70630 - DNA, 1463 bp, Homo sapiens
caaatcctgcttttacgcactttatgagctggcacacggtagtaaactacagaactccaactgggaataactctaatctgttgttggacctcagaggactgcttgtgcgatctttaaaggaaagcagtgttttctccttactcaacacctaccaacagtcatctggaaacctcctctccaacaattcttactatactgctactaaccttcacatctctcaacaccctcaacggcccccacgctggtgctgctagtcctcatcctcaaacaccttcctgggggcttaaagccggtccacagaggctcactctccgcaatgcctagggtccggcgaggaagggcatcgtcccctccgtttgggggaccaaggccaatcaagtcgacaccccaccccagccactccctctcccctcggcctctcggggcgtctggggcgggcgcggacgcgccaggccctgcgcaaacctccggcagccccgcagttcccgctgtcagccgcagtcccgggccggggtgagtccccgggacgccgcagttgcgcacacgcccaccgtctcaggcacagggtcactgggacgatcccgggggcgcccccgacgtccctgctcgggcaggtgccgggcctccccgcggacactcaccaggcggctgctgctctctggccgccgccgccgccgcctcgccctcacgcccgtcgcctactcccgcggggggtccgggccggcgccgcttccccgcccgaacccccagggtacgcgccgtgcagggccgggatccggtgtgagccgccgccgccgccgccgccccctttcctccctcctccctcagtgcgtccctcccaccgaggcccgcctcgtatttcctagatccggtctgagcgagagcttggcaagcaagctctggcttcagggcttccgtcgggcgccgtcgctcgccaggcacaaagatggcgccgccgggtactgcccagggcgatctcgcgaggcttcccccacaggaacaggagggcgggggcccaaaggaaaggtgataagttagggaagcctgagcaaacgcttcccatatcggaaatgggcagtaccagttaccgaagaagttactgcgcctgcgtgcgcgggtaatgacgcatgcccggaacggcccctaaagtaggacctagttctccaggttttacctgtttccactagtggcgcggggcggggtaatgaaacccagtcaagaaacccagtaaagggcttggcaggaccaggcaccaagtgagaggcgtcccttaaggcttggtcatccctcaggagcccgaatggccaacacactttttgcgtccccgggagtcttctaaccctttgcttgtccttatgggttttgtcaccgagtattctgtgcaaagcctcagctgcaccttcttcatcctgttatgggttcacattattaatcaagagcttcttgctgtgtgcttgcagatg

SEQ ID NO: 70631 - DNA, 657 bp, Homo sapiens
atccaaagttaaccacaattaataattttaagtattttcagccagtctttttcctaatcagaaccaagcagagatggaaggaacctcagagattatctagtccaacccactcattttatgaatgaagggaatctgttaaaaggtagactatttctggttttatttaaagttgtttcaacaagagtagtagactctaatgataagacagctcattaccgagtatagatgtgtttagataaaccccgagttgcatcatgggtccctcaaagagctggcgtagatggagagcctgaccaaacccagttagcttctaaggccttcctgctttgatcattgtcctgtgatgatgtaatacttggagctgcaccagccattttgtgaccatgaggtgacaagtccaaggccacaaagctgaaatggaatgatagaaagaacatgggtccctaatgacataattgagctttcaaaccaactctaaaattacctaccctcagatctcttggtgagaaaattaaacacttttattgtttaagctcctttaagttggatattctgttacttgtagaccctaaaatccatattcataaaccctctgcccttgagcacatataggtattttactattctctgcctcaatgcctttattggtaaaataaa

SEQ ID NO: 70632 - DNA, 585 bp, Homo sapiens
caacgcatttcttatttctttaataaaggaagtgtcctgagggccttcccagagaaacaaatccgatgtaatttcgctaaaaattaattaaaaggcctgctctgaacctgtgtgtttatggagttacatgaactcatctaggcattttcaatgccttgtgcaggccccgagccacacttagtccattcttacgttctccctccctgacctcgtgacctctactcagtcctctaccaggcagttccagcatgcctgccatagatcatcatcctgtctgctcaagcttcaaggaactatcccagtaatgtattaacaccagccccgggtgtccttgccaggagtcaaactctgagtcatcaaagtcatcccgtgacaatacattcctcccaatccagccttataatccactcccgtggtttactcccactggtgtcaccacagttcttgtttgtacatatagaccaggtcttgcaattgtttagatgggcatgccatttccttctagaacacggattgtatttccattcttggcaggtgctgttacctgactcatattactggtctggcagcagtgagggaaaataa

SEQ ID NO: 70633 - DNA, 777 bp, Homo sapiens
gtggggtccaagacaattcttcttccactgtggcccggagaagccaaaagattggacatccctgcaccacatcaaatgaatcactgaggcctgtcaaatccacttcctaaatatttctaaattctctccacttatctcccttactactctgctaattcaagccaccacattgctggtttagattactgcaacaggtttttctcctgtcactcccacatcgcaccaatccatactctgttccacagcaagaatcatctttctaagcgacaatctgattatgtcacccccaggccaaatcccctgacctctaaattccttaacttgggttttaaaaaccttgcacaatctgcttcctgcttctctctccagcctattatttcacaatagatctttcccctggaattctgtgctttagccatactgacatattttcagttcctgaatgtgtcatgctttctctgggcccttcagcacatgctcttctttctgactagaacgctcttcctagagagagagctgcttactcttctagagttacctagcttagacatcacctcttcaaacaaacattctttgaatctcattccacacagttagctgttcacatagtaccccattgtcccactgttgcacaactaaatatatgacattgaaatggtcttggaaatagagacaagatcactttatttttttaaccaactgtagacattcttaatacattatacatatatttgcttatgtctacaaatttcatgaacatcctggttatcccttgtt

SEQ ID NO: 70634 - DNA, 673 bp, Homo sapiens
gcataaagtttctcttctttttttccctttctaatcctccttctccactgcctcgtaactcatgtgcctagtttcctatcatctttcttctttcaaagaacgacgattcctctcttatgaccccaattctaccctcttttcctattttcctggttctattcagcatttagaacaaatggtctaaatgaggtcacaagctccatccaaatcttagcgttcatatcaagaattggcaaattccagtagctagagatccaagtgggagaggcaagaatgatctgattctttcagggcatgaatattagtgtggaacagtatcagagttcaaactttcttcccttctaaatacttctaactatgacacattctgcctctagttaatcctccctgacatcttttcagcctacccccaacccactgcagtgaataagccttctgctaccagttttccacgcaccaaagtccaatccattctcaaacagtgattcaggcataccagaagaaagtagcagggaatgcctccagctttgttcttttggcttaggactgacttggcaatgcgggctcttttttggttccatatgaactttaaagtagttttttccaattctgtgaagaaagtcattggtagcttgatggggatggcattgaatctgtaaattaccttgggcag

SEQ ID NO: 70635 - DNA, 828 bp, Homo sapiens
atgagggacatatcaaacctaccttcccaaccttatgaccctgcactcccaaactctacctgctaagcccaccaaaactacctgcctgtcctgcactattccatccaatataactcttgtgcgtggcttcttcatgctgctccttctctcggcaatgctcttaccccacttctctcccagatcaatgctgttagtgtttatatgtttacttcctcatctcccaggttagaattaatggcttcctcagcattctaacagtatatggtttatacctgaagcacttctatcatataattcattttagttatatggacatgagtgtgtcttgcaatagattggaaacttcttgatagcagggaccattttttgtttacctttctcttcgaatgtctccaaccctttctgcaggaggcacatagtatatggtagcaaatatttgtttaatgactagttgaccaaacaaatggatgagtaaatgagtaaatgtggtacgtgtgtgtgtgtgtgtgtgtgtgtgtgtgtgtgtgtgtgtgagagagagagagagagagagagagagaagagaagagaagcgatgcggaacaaacaagtatgcctactgacactgagtgcactgactgcaggtctgtaatggttaattctatgtgtcaagttgactggactatggggtgcccaggtaaaccactatttctgggtgtgtctgtgagggtgttttgcagacaagattagcatttggttcagtggattcagtagattgccctccccaatgtgggcgggcatcatcctgtcagttgaggtcctaaacagaacaaaaaggcatgttccttt

SEQ ID NO: 70636 - DNA, 559 bp, Homo sapiens
tccagccctccccctttattatgttctatacaacctaccagaagagtacacagactctgctgaggcaaacagtgcctcaaatgaaggggctgtgcatgcttgcaagacaagcgaggcaggatatgaataggactcctagcctagtgccagcccaacgcttctccaagaacattcttcctctaattctgatgaactctgccatcaaactggaaggcaagagagaacaaaacagcaagctctttgtccgttgttaagcctttaatctttcacctcaccgatttctaaaatgcactttggatgtttgtttattggttttcttgcttatgcaactgcctcattctgtgataatggagtcaggttatatcaacattaaattgacttcatagacccaagtaccttaagggtatcattcattttaatttagaaaagcagcaatcaacctcctatcctgtttcatttgtcaaaatctttagttttaattacatctacagacttatgaaaattgtgacaggaagagaagagatcataggaagcatttcttctgccttttttttttttt

SEQ ID NO: 70637 - DNA, 1010 bp, Homo sapiens
gattgagaaaggtcaataatagaaatgctgttttcctcctttcactaactgattaaataacgcatgggcatatgtatagctacacgtgtatttctaaggaaaatcattcaaaaactgcatgatttcctgaggtgacctccagggtgctgaaaatttagaaaacgtaacatctaatgcaatcaataaaatcaagaatctgtgttaggcattttgagagttttggagtgagtgacagtacagccaattgatatagtccccgtgaaaggcaggtaaggcatctttatgtggctctctattgatgagaaaagtcttcctaagagaataaactagatttagagtgtgtcttatgaaaactgttgtttcccccatgccttcccagttaactcatttgtataattttggggcttcagctttgatggggctcctttatttgcaacatttagattaagttaatgactgttttatcatagctaagagcactagaattaggaggtcaatggctattagcatttgattttcttgatgataccaaagagatgagtttgagggggaagaagtgtgggcttgattactcatgttttaatttcatctcagtagacaaatccaaaatgatgtctcagggatgactcagaattccagatgggatatgtgtacttttgccctttgtccagtcctttgcacactgggcatatccactgacaacacaactgtcagaggaacaagctttcaatttccagtttcaagagggaatgagatcaggcttgaatgatcatttatggtgactgaattgctttctccgacaaggaagcctcacttgttcgtggactttacggatggtgctctcaaaaattggccagttaatctctttatctgttgcatctttcctagattccattgtgtctttcgaaaatactgtaaaatttacaaatgtagcttaggcaaaatgcaaatgtgtttctgtcttaaaaagaggaaatagctatctgcaacgatatgggatggagagaaag

SEQ ID NO: 70638 - DNA, 1311 bp, Homo sapiens
taaaaaaataaaatgttgctatgcatttacttataaattattaaatgcctctaatattgttatcttctttctagaagtcctctcccaacttattctggtgttattggcatggaaattgtgctcaataaatgagtcagtcaaaatagacttgttcatttcaggggacaatttttgtctgttatctctctattgatttctgttgctacaagtgaagttacaccaggtaaatgagattgtacgcatggcagatgatttatgaaatccaagtattgttttaagtgtaattatatttatttcggcaacatttcgaccaatgaaataccatttgacctgctataccgtggataaatcttgagatgcacatcttttgtgagtaatatattaaagattgttaggcaaaaaataaaccctaaggaagtttttaaaaatgttaagatgttgatgttggcagtagaacaaactcattgggagaaaaaaaaacagcttcatctagttaattaacaacaaaacagctgggaaaatgaatcatccctggttgtgactgactgtaattgaaaatgactaatgatgctgtcattttgcagttcatatctgaggaaatgatgcctggaagattataattgccctcttgaccatttgtctacagcaattattttgtgttaaaggttgggatggaacgctttggccaaatacagaaagttcctcacacctttttctgttacattgaaaaataattcaagagcagtaagtaaaacatattactaggtttgtgtaagtaacattttttgataatataaaaagttagcaaagcaaaccagctggcttcattttatcactttagaaagtaaccaagacatttaaaattccattaatgctctcagttctaatacatggcaggtgatgtaagcattgaaagtacataaacatatttttaaaagttaactgaaagtgtagttttccaacttaagttaaaaatgagtatgaatacaagaaaatggcacctaaatgcttaagctcaagacagttaaaaatacaattttataataaaaatcaaataacaaatggcttcttttgtagtttatattgttgttactgatagcagttgtttttgctgcttttaaactgctaaatggggtgctattgaggacctagttattactgtgtggaaaaatggaacacattaaagactatttcatctatggcattaatgtaatatattataccaaaactataactttagcaaaattttaaacaatttatataactcatatagtcagtcttcagtaatttctgaagttaagatgaagaaat

SEQ ID NO: 70639 - DNA, 924 bp, Homo sapiens
aatcacagtgtatgttagttttattgcataaccacttcattaccacacatggattttgttatttttctcaagacctcaaacatataatacattacgaggtaaatgaacatttctagcaagatttcaaagtcagtaaaatttgatgtacaataaataggttggcagtccttggagaactctgcccttattaccacactaaaaccatattgacttttcagtaaactttggtgttcatgagcagcactgttattcattaatttatttgtttgcagtataagcatctaactccatggtcaaagaatacttaataatatacgtgagtacatggataatattttctgactgttcaccttgatctaaacctaccctaaagttaggtaacaagccctttaatggctcctggaggcattagacaaatgaagtgaataggtgacattgatttgctcaaacctcaatagttctaaaatggattttatagggatttatacccatctaactatccacctacccacaaactcttcactaaataatgtgattttggtcacatactgtttaaaccctgaggacaataaaatttaaagaagttaaatgtaatttaatctctctctctgtctctctctctctctctctctctctctcacacacacacacacacacacacacacacacacacgcacaccacagaatgtgttgttacaaattaaccccgtatttttctccctctctccctccctcccagccgtactctaaacaaaggctctacaaagtagcactaaacaagggctactttattcccacactctccaatcagaaatctttgatcttatttgcttgaaggaccttagcatcagcctggctgatacagaaaaatgtcccttggattcgtaggaaatatcatttttaatatttttgtttgctcatttt

SEQ ID NO: 70640 - DNA, 1094 bp, Homo sapiens
tcagatgaggatgcctggtggtagtttcccttgtaggagggataggcagggtaatcaagggaaggaaagagagagaggcatgtggcgaaaaagggaagtgagagttgagggattacactagtgctgcatgcaggggaagggacagtaactaacagaggtttggaagtcaggcaacctgacttctaataccacctctaccgctacttatagaatccgagggccttccctgagtatccttggaactgaaaaatgcagacatttgatcagattaattctgaggtcccttctagcttgactgttccacaaacattttgtctctggcagggaatggaggagtatacacagccctgaacgtgtcactgagcttcaagaagacaaagactgtgtctgcctgacacctggatgcctgtgaacacaaaagatcttctctgagggtttattgggagcttgtgacataggcctaaaatgtggaaaatcctgtgacaacaggataccctgtcaccctaagcagatgtaagcttaattttcttcacagcaagataatgagcaatagaatagaacctaacaaagcaattttggatgagggcttaacacaatcaactgccatggtgttccagccatttatttacaggatttaaacgtctttcctccaaagccgggactcctgccagataacctgtgtaatggacctagtgcaatgacctacaccaaatggctaacaattttgtccagcccatgggctttgcgagtggggctcatctcttggctctggctaagtatgcagctacattcccgatgatgtggcaacattttaggctctggtttccaggagagagctgagacacagctattctcaggccttgggaaccaccgctttgagaaacaagttaggaaaatgcagaggaccttacgtcccgggggaaactcacagaagttttggggcatctttataatatttgtcaatgaaagggaaaggaacattcctttgaaaggcaaacacagaacttgctctgttcccaacttatgcctccaaggctgtgtgaggagattcttctgaagtctacacatcgctgtccattagagcatctctatta

SEQ ID NO: 70641 - DNA, 720 bp, Homo sapiens
gggatccggtgatgtgagctttcctcatgtctcccagtggtgaatagcctcccagtggttatacacagccttagagtgttggctttttcaaacaccagttatagcaacaatgaaatagtcatgtggacggactcaggacctcctggttagccagagttgtgtaagcagttgtgatagctgaggtcacgcagttgttttctcctgcctgtgtgcagtgttattccaccagaagatgctgtaatggactgtgttggttgatcttcagccaggaggtgacacttacaaaagagcaccagctgtgctattagtagtggggtttttcttgccttgtgcttcccaggggtggggtactctggtttattaggcaattggcaggaccatatcactccccaaagttcctttgtgttaagctaccagggcaaacgtcagggcaaagtcaggtgagggctgggtcaggcgggtttgcactctgaccctctgtgttcagaacaagcaccagcccttgcgggtgtttgggaaatggaagcagttcccaggccacttggatgatgtccagaggggagtgtttctccctctgctgcacagaagagttcatgcagggagtggggagtagcaggaggaggtaagtccctcacagatcccacacactacgtgaggcatatctacttctgcagtgttccactggcagcaatgagctaagtttcaggtcagtctgcactc

SEQ ID NO: 70642 - DNA, 909 bp, Homo sapiens
gccgaagccattcctgggcgccgctgtcgtccgccccgccgcaggcgaggacgccaggcgggtccggagagccgggagccggacctcccgaagggagaagccgccgagctgccacgcgcggggactcgctccctcggggctctgcgcgccccctgccgcgcggccaaggtgggtctgcggaggcggccggccgggtgtgggtcgtcggcagccgcagcgacgtcgattccaccccggaccttcgccgccggccccgcgccgcgctctgccagcgcccgcgcccgctcctcccggctcggccgggctcgctccgccccggcccctccccgggctgcgggaggcggtgccgtacggggaggggcggagggccagcacttggtggcttcggctccagttcccagtgccggaggctcgcgcctgtcccgcccctaccccgcctctggcccgcgggcggagcccagtgccagcccgcgcccccgattcgcagcgcgcggcagttccttgaagcagccccgcgcccagcccggccctcgccgggcccccagcctcgctggctccaggtcgccgggctctcccctttcgcccagtcacgtgggtttccttttcttagggagcaggagtgggcggttttctagaaggcgccagaggtggattcctaggtttcctaagctgtgcctcttggagcaaggacaggtcctctgtctctcagtgatgtaacacgcccctccccggacaatttcacatcctgagagatttgcgggacggaggagaaaagtgactaaatgcattttgccctcttttcaaaaccagacgggcccaggagtcccccggttttccctgttttctcacttctccgctagcctgctgccgcttctgttctctgggctcacctgcttttgcgccccccta

SEQ ID NO: 70643 - DNA, 848 bp, Homo sapiens
caatctcctcatttaatttatgttttatttgctatttgccttatatattctgtctcttgaaatattgatgtgcttcatgtacaggcactatttctgatgtgatgtcaaataaagagtttttttcttcaactttgtgcaaaatggttttatctctggaatgtttcttctaccagaatcctgattggtcacagttacttaatggcagctgctgtctgcaggaaatgtcaaggagaatagaaaatgggggccagtgatgttggagaatagggagcatgatagtgtgagaaggagagaaagaattgactctttccaatttactcaaacccctagcaagcgttctcagtacaggctgaattgaagatatggtcaaagccagctgtctgtggatgttcactgcacattaccctctccatgcttaatcattatgagtcacctatttgtattgctcaagctcagtactcagactcagagtgtgtctgcttggtgccgaatcactctgcacaaagagaaaaatccatttcatcatatcagtttctttttctatctcagtgattccccagagcttctccagaaccaggtatatcagaaacacagtagataattattaaaaacatagaatttgaactttgttacaaactttatgaatcagaataaccatgtatgtggtctaggaaaatgcattttattaatctccctaggcaattctggtaagcaatggggcaaagaactcttgtaaacataaaactaaattagcaatatgattttctaataattttagaccatttattgttttcaagccatgcctgaaagttagaaacccaattttctagaagtttataagctcagag

SEQ ID NO: 70644 - DNA, 3971 bp, Homo sapiens
gaattggaataaatgatggtcgaggtctttttatgttccaaaatactgtaattactagataactaaatgcatttttattgtcttgcattcatattttacacatttattgtgaaatattgatttatctattacagcagtttggcctatcccaagatgaggggaatttaattaataaatggaataaataaaatgcttttagacttgcttttcatacagttttgaaattggcatgcactcctaaaacacagatgggaacggtatctctgtctctgtctctctctttctctctctctctctctctcacacacacacacacacacacacacacacacacaaaagcacacacatacatctctaccttcattatccgtatcatttctgattatatccggcaactagaaggcagtctcagcatatatagcagtcatgacctcagatatcttctattttgaggcaccaggctgtccaggagtcaagacagtgaaacaagtcagcaataatatactaaatgcctgcctgagtctgacctgcaccaggagataggaaagacaaatatggcaagagtacttcctctttaggagcttatatagaaactaagtgttagataaactggagcccaagactcttctgtatctgattccattataactctctttaaccatctgattaaatcaagggtgtcaatatctctgaagactatgtagaccctgtgcacagggagaaaaaatgtttttatctccatatggctcatgaggaaacatttagtgtcataagcaccttgctgctacattgtgtcaaatctttggcttgaggtaacaggacaagcagtatcttatcacctggagctgaaaatagaacagcctagttttcatcagaggaaatagtggcccatgactcagagttctagatcaaaggtctgtcactagttggagcatgtttagacatataatctccatttagtgttacgtcttaattgacaaacatggaataatgctgctgcctgacctggcaacagggtagatagaagtggctattaaaattcattacattgttggaagtgaagagagggacacattgattctgtacattgagtttaaactgaaagatataactttttctggtttctctaatacatgatttttgaaataagccattaagaaagttgatggaacatttgtgtaacatcagatgttaatttaatcttaagtaaagtgactttcttccatcacatagtagaaaatgacaattgcggttaatgaactgtggatccactttggaaataataattttacttaccttccagccactaatttaagtgcttatcaattagttattacgtaccctgaattttagtcagtaagatttacttcacttattaaaattcaaaagaaccaataaagaattatttgagaattacttcagtaatattttaggaaaagtaatggttatttttgacatgatatatagtgcataattttgtctttttagtttataattgcatctggataggcaaataaaataactgacagcaaaaataaaacttgttaatgccatgtcatcagcaatttttgtgaaacaagcattggagagcaacaaaactagtcagaggcctgaggtatttttgcactgtcacttaacatagaaatagccatccaaattttgtttctataacctcgaggaaatctaaaaaccttcagcattcatcaaatgatgacttcactgttgcctcattaaagccttgggtgtcaaaatgtacaatgatcaagattgtgagtgccattatttgtcatattttcaggattttctgatttgcatgtagtacctgcacatattcatgtaacattagagaaatccactatcccacatgcttctattgggcattatctattataatacaatctattaaataagatattattcaattctttttattttaatattattagctctatatttgtttgcttcataagaaggcatttttttcaaaagaacttaatgactgaatggtccttaaattacaagccacacagctagcacacaatccaaacctcaggaaaccatggtgtgaaaaaatgaatttacagcaaatcatccaaagcctggagcagtgaatcaatgtacagggagagcatagcacttgacctcttcccaatttcctttcgtcatgtccagtgtttgtttattctctgctaaagtgtgctgagccatgttggcaaatactatcatgggatgtttccattgtttattgtgtggcataaagtttctttcaaaataaaagcaagaccctctctgttgcagctctggaatgtttctcatcactggaagtgtggggtctgacttactctttatacctaatttctgctactttctgggctggtacggggaaagtctgcagatttggtttgtagaatctaaaagtttttaagacaaagagatcatttggttcaataattcatatccagcttaaatctgttacacaacaggagtggagggaagaaatacgaggaagagtacattttattgttgctgctgctgcatgagtcgggatctatgagtagtgttgtgttgggtgctatatgcatgagacagacacagtttcaaatcccagctctacaattgactatttctgcgatgtcgggctcgcagcctccttaggtttcagtttattcacagactaaatgttgttaattcctgcctctcagggttgtgtagggttaactgagatcatgagtgtatagcacttaacattgtacatggtacatagttacaggctgtggttattgttcagtaaatattctttatgatgacggtcatgatgaaaactgctgataattgtgtattggaggatcactggaaattttcttcattcctgatagactatggcacggtgctgttagcaggttaaaaaaaaaaaaaggatgttgccaagtaaaagtgcaaagatcactttatgtggtcgacctccatccagtacatattgttggggttcagattgtttttgctgtggttactagagaagcttctgggggaaaagacactgtattccagttcaaattgagacccagtgtgtctgtgctttgagaaatttgttctgatgacccatgaggtatgagtcacgtttgttctcatgactaggctggcgaaaattcatgtgttggaatcatggctagacaagagggtgaaagcatgcaaggtgttctctgcttttagatttctggagacagtgagaattttctgctcagcagtataatgaaggaggtagcaaactagataattcttcaaaaagactgatctggagctcaaacttcacaaaaaagccccagctgtgacagctttattagtactcctcacgttcctgagccttagtgtcatcagcttccaggagatattcccaacctgcctgtctatttaaataaaataaatatgtgcttagaatccacaaaactctgaactaacacagtgtgtctaatatttgtgctagtgttactgtataacaacagaggtaaatctgcaggcaataaaagaaaaaagaagaggacaataatatcaggggaataagaacaaatgcgtgatccaggaaaagctatgcctcagagaagaaacaataatattttatgggaactgcgtggcatgtaacatagtgattccctattctgattctctttagtggactcatttaacacttatacctacagacctggaccatgatccatgtcctgaagacagacttgttctattcattttcattctcagatgcaccaggaagtagctcagcagcaccacaccaagttatataatcacaactctgttaaataactgatgttcaacatacgcacaaagcaagataagtgctatggcaaatgatcagtggaaaagtagccacaaggtggaaccagagggaaggttggaagcaacaagactcccccctaaaggctgccaattcaataggatctatagctacttgccaagat

SEQ ID NO: 70645 - DNA, 6837 bp, Homo sapiens
atgagatcaagtcctttgcaggaacatgtttggagctagagtctgttacccttagcaaactcatgcaggaacagaaagccaaataccacatgttctcacttataattgggggttaaatgatgagaacacatggatacagggtggggagctacacacatcggggactaccagagggtggagtgtgggagggggaagaagatcaggaaaaataactaatgcatactaggcttaatacccaggtgatgaaataatctatacaacaaaccctcatgacacacttttacctatgttacaaacctgcacatcctgcacatgtacctatgaacttaaaacaaaagttaaaaaataaaaaataaagaaataaaacattagcattaatatggaaggttaggcaagcttgaaagttttttgagttcaaagggacgtcacaagtagagtcacttcaccactgagagagcctgtgaattgttcttacctgtgttttctcagagccagaaaattaatggcaagagactggactatgactctttacacaggagcacagtcatacatttgttttggaattagaccattttacttgtatttaccaagcaaaggacattctatgctgtatcctcaaggtcatttaaaactgaacactacctattccatgactaatctttcttttttgggatgaaagatggaaccattgctagaaggtggtggagtttccttgggtaagcaactgtcaactcctaatgataggatttgagaacctgcctttccaatggaagaagtgaaaatttcactcaggatccactacaagatgacaaagggtagaggtgttataatatctataatatgtttaaaatacttctaagtacatatgcaatatatacaatatatataattctatatatgatattaattgtgcattacttaaaagatttagttcaagctaacttaggttcaaattatatcatacttaagaactatgcacagtctaggcatggtcagctggtgctccaatgagtagactacattcaaggggcagctacttaaattgcctctgtttgttgtatctcgatcaaccacctagactttgctaactaacatattaaatgtcacaaatgaattttatttatgtaatagtagcatgttgactagaataatgactattattaatagactcatgggggaaatgaaaagtgattaagatttatggactggttgaatttagtgtaggagatttgcttacccctgcacaaagaggccaatagactttttcatttaaaatggagctcaatgcttgatctctatatagttatgtgccccactactaatttaagaatatgattcttaaagttgtcctcacattagaagtacttgaaatgcttttagaaactactattgtcaaagacacacctcagcacaattaaatcagaattctttggaaggattccaggtgtcactggtttttaaacttctttggtgattgcaatgtgtaaccaagaaccactaatctgagaggacgtgtggtcttaactatgataaggattgcagattccggcctttgcaatggttttgggtctgtctagagtgaccttttcatgaaaggagatagttggctcacctaatcagactgaaagctggacttcatggaacacacagaatgggttgtataaaccattctttgcctgcttgataatcagtttttgatgtatctgtctacacatgtagtagcatttaagactgaatttaccctgacagagaagttttttgaggaagcaacaacgcttagtcatctccaactttagagcagcatagtctatcaaaaataaactaaggattacacaagaccaaattggcctgttacatatcattggttgctggggagcattatctgttgcccctttaaccatgggctgttttgcataagatagtcaatattttggagtactaaatcctcgacagaaacttaattaccatatttattaagagtagagacattcaataataagtaatttgtctttgatcagcaaagcaaaattgtcctaaatagagaaatatttactttgtagtaacccaccacaaaagagaaagtatgccccttattatctttgtaactaaatttagcacttgaatttagatcttgagcttttatttgaacttagtggtcaaaaatttaatctttgaaattgaaggtaaatttagtaaattctggtttgaacttctacttctttaagtcaagactttcttagtgaaggaattcccccattctccctttctttctatttgccctagaggttttttatggttcagggagatttataaataacctagtacttgggaatatatgtaatttatgcataacttaacaatgaaacaaacaaaaactggttttggctgagatgtataatcttatttgatcttttttgatatctatccactgcctctgtgactcaatgtccatatgcccattattctgtggtgcccagtttattgtggatcaatgtgtcttcattttcctagaattctgagatgtctccaagtctcccatccagttttagccatttctatatctttctgaagggtgtaggccactttaggatgctcccacaactatcacattgaggtacatgcactcacaatttattactataaaattcaggtgacaaaatggccttgtgacttctccaggggtctttcactaactcttctttcagtttgggttccactaaattatttctggattttttatcgtacaacaagctgtaggataggcctgggacatttcatccacaacttaacttccttgattatctttgttcattattttgctttccctaaaacaaatacatgggttctttgtcaggacagggtcagaaaccttttgagttgggtgcagatggcacacaatcaaagtgtgcctctttcaaggctgattttattggaatgctaggctttcacaatctttgcgtgttctatgagctttaaaaaaatctacccagaaactcacttgagttctttattcttaggtgaattagcccttccttgactcaagtaataaccactgacccaatgggtagagggccccagattttgtttttaatgatggaaagaaaaaccttggttattatcaaaatattatcttttgctacacttgtagcaaaaacttgtggctaattgaatggctggacttggaataacataagctattagcttatgtttaaagtactttgttgtgagaaaactgaggctttgacatgttaaattacttgactgagaacccattgctaattaatagcaactctgggaacaaaaacaaaaacacagtatttttgtacttctggaacctcaagaacttagacatgagaaatgaaaagtcactagctcaatatcaatgattcacaaacatggctgtgtgttagaatcaaccacagagctactgaaaaatataatgacgctcccacagaaagtatgcagattcagcagggtaaggtgtggtccatgcctctatatttaacaataatgtccacacataatttctatgctttataaaataaacaaagctgaaaagcatgtgtaatacacatgcaatctacctcaaatgttactatccttggtcgtcttttcatcagctctttgctggtttcctgaacatggatggtagccaagggaggcattagctctgatatatgcacagtttgcggcaatgattttaacactttgtgttcttcaaaatcctctaggatacttgtttttttttttttcaaacctgttaggaggactttcatcaaaaattaaagaacaagtgttggcaaggatgtggagaaaagggaacatccgtacattgtcagtgggaaggcaaattgatgcagcaactatggaagacagtaaggaggttcctcaaacaaaaaaattaaagataggactattatacaatccagcaatcccactcctggatagaaatcaagtgctcaacatcattaataagttattggaaactgtgacctctagaaaactgaggtataattaaataggatacttcttaaaaatgtaattacaatgtgccattttgaagttgcatggagtgccttatagacatttgagaatggataattaacaaatggttgtatactagaatttgatctaaggcttacttttattatgatgtggaagtaaggattgggaccctacttaacctttactcacttcaaaccttttggcttttttcatgtatctaccaagaaaaagttaataggtgagtatgaccaagttaatatggatcataaggcttatttatccagcatttgcctccaatagttgaacttctcttttttggaggctgaaaaccatctatctcctggctttggaccataacctggcagtgagtaggaagtcagtatacttgtctactgggggattttccatgatgacctgtaaaaacatttcccaaaatatttttgagtttgttcctggaagtacaaactgtcttccaaacttgcaaaatgagctgtgatgtttgctcagtggagattttttaaatcactgaattttctgattgataaatgtctgtttggagaacagagaatgtctgccaaccacaatctgcctctcaataattctcagagaacacagacggcaggaaagtttggacctcaaaagctctggaaacccaggggtttctgttgagtttaattactttgcaggtaagacagaggacagatgtataataccacttccagcaacagagtgaacttcagtatcagctcaaaccattacttcttggctccttgtataaatccccttgaatacagagacaggaggccaaaaatctgtgtggtgagtgtacttccagacaaggcaggtgagaacccttaggagaaatgcccctatcaggacaattattagggcagcctcattaccaatgaattgacatcagtgggaggaaaacctgagagaggaggaagaataataatgatataaataaaacggaggaagcactggaaactaaaactgcaaaattaaaggtgatcctggaaggaaactaaggaaatcctatttcagctaagaacaacgatttgctttattctctgctccagatccaaagaagcttaaaaatattagaaaagttagacacataagaagtgacacctacaaagcaccaaaataaacaaaacaataagcctttttaatgaaggaaaacagcttccactttgtgacggggctgatgtctccaatactgagtttattcattgggatagaggcactgattgcagaaagtttctactgaatgtcaaaagcctgtaaggggtaaccctacaagtcgacatcaaccatagaagagacccccaactctttcagagctgagacctcaaattactggaggaggaattgactcaaatcctgaatcacagggaaaataaaggtcttaaatgggaattagcataacttatcatttccagcacacctatctgactaccatttcttcaaaacgtaataggacagtagttctcaaagtgtgatccttggaatagcagcagcaacatcaactggaaacttgttagatacaagcagtttcaggctccatcctagacctacttattcagaaactctgggtagaggcccagaaatctgtatctctgtgtgtacagtgtgtgtgtgtgtgtgtgtgtgtggacatatatatgtcaaaaataaagacccaacactggcatgtttctaatttaaaaattaatttggattttactagtttttttttaactaatgaactgtttttctgttccatcatccaacacaggataccacattacatttggtcttcatgtctccttggtctcctctgaattgtgatagcttcttagactttccttgtttttttaaccttcacacttttgagtcaattattttgtagtctgtccttcaatttttattcttctgatgttttactcatgattatattgtgttataggtgtttgaaatgaataccacagagatgaaattccattctaacgatattatattagtatgtacatgctatcagtatgacttatcactggttatttcaaccttgatcatctaactaaataagtgtttgccaggtatcttcactgtgaatttacttgatttctcactgttatccttttctttggaaccaagtcactaagtccagcccactctcttggggagtgggaagaatttagttccaccacctgggaggtctatgtataaaatatttgaaattcttctggaaggaatatttatcacccacattttatttatttacttactgactcattcaatcaatcattttttatatctgaatagactcaggtatacttattttacactggagattttctatttatctagaaattttttttgagttgacttgggtgtcagaggtatgaggtacatttcaaggtatgttttttgtttttttgaacaatttaatttttgactatatattatatatatttaaggtgtacaatttgatgttttaatatatattatgaaatgatcactatattagggctaattaacatatttatcacttctacatagttaacattttttaatcctttgactaatgtcatcccatttccctcttcccccagctcatagcaaccaccattttactttctgcatctgagtttgactactttagattccaatatacatgatatcatgtagcatttctctttctgtatctttcttatttcacttagtgtaatgtcctccaggttcattcatgttttcataaatggcaggatttttgcttttgttgtctgtgctggtgttatatccagaaaattattgccaagaccaatgtcaatgaagtctttcccaatattt

SEQ ID NO: 70646 - DNA, 552 bp, Homo sapiens
tctaaaatatgttgcaatttgaaaaacacgccaagaaagaaagaatgcatgcatatattttatgtagtgtgtgtaatataaaatgtgatatacgaaatggcatcactctggttcaaaacacaaaaataaagttcaggaagctatttcaagaagattgcctgcattacctgcaaaaagaaaacagaaacaaacaaaaaaccaggaacttgccttgaacctttgaactgggccaaactgcaatgaccacaacatcctggaaaacagccggatttcaccaacactgcaaattcctgaacagcaacaaccaatgaactacggatttgtgtactaagccagctgcctccatcaatgatcattctttcaaagcaacttgtgtaatcacctttagcttcccttcaaaaacccttacttccctccctttcttctgaacgcaatttggcttctagccaaatatgtgtcttccaaatagcaattcctaagacaccaataaatgcctagtcttactgcactgcagtgtggtctttcgcctcttggttgacagtaatatatgtg

SEQ ID NO: 70647 - DNA, 814 bp, Homo sapiens
ttcccagagaagaaaaatgatttttctgggcgcagccccggggtcctggcgcaacgtgcaggctcgcggcgtccaccccggacactggcggcgcccgcccggcagaccggtaactctgacaggtgggcttccggggtcctcgccgcgcgcctgtcactaggcctcgggccgcctccgcactaggcgcctcccgcgcgcgccggaaccgggtccccgcgggccgccgtggggcggcctcccctcccccgccctgcgcgctccagccgaccctggccccggccccacctccgccgcgggccgcgggcgctgctgtcgaccgggagggccgggcccgggacccccgccccacgattacctggggagcccccaccagcgccgagcgcgcggggtccccgaggcacaggggcgcgctgggcgcgggaaagcgcgggtcggggccgcgcggcgcctacaagcggccggggcacgggatagggtggccaggggtcccgcccgcgccccaggcccccgcccgcggctcccgcggcatcccctgcccgcccgcacctggctacccgatccggccgcgtgggtgggggcgcggagagggcgcggtgcgggggccgggccgggcggtccaggccgcggcggggtccctgccctgggccgagcagcgccggggaccacaggttaatttttaattgctagctgtgtacgtaattcagggatgcagatttcaaatatacgccaaaaaggtaggcaaatctgtgtgaatttttcttttaattcccaatatacttacttttttgttattttcaaaagcttgtcttgcttc

SEQ ID NO: 70648 - DNA, 1739 bp, Homo sapiens
cctattaaaatgatctgtcattaaaattgcagtgctgtggcaagtaattttgtctatcaaataattttaatattgtcctaaaatgatactgtttcaatgctctcagtccagttagaatatataaatcatttataacaatgacatttttgtttctgttacactcttcttaataaagttgtatggatttggcttcacaaaattttgactttaaactcttttaagaaagggaaatgaattcatcactctttgcttgtacttttatctgcacattccccgactcttcccagtgcttactccataataggaatttgaaaggggaaaatgtagggggttataggaatactctactccttttggtgctatgttataaaaattgtttttcctttttaattcataattgacaggagaactacaactgtaatgatttcaattctagaatttccattgagttcttttttatagtttgatttctctgctgagattccctgtccttatattcattgtgagagtatttttatttactttcctgggcatagttaaaatagttcctttaatatccttgcctaacagtttagacaattgcgtcatgttagggtttatctccgttgattgccttttctactaaaaataaaatgggccactttttttgttttattgagtaattttgtgttttacccaggatattgtgaatgttatgttgtggagactgtagattctgttataccctcctgaagagttgatttcgatgtggttttgtcggcttgtttttttaatcaggcacaacatttggttggtctcaaagtgcgtggtccattttctgaagcagcaacagttcaaatttcagtttatttagatttagccgtgttaacttgagcctacctggcacatttgtggttcagccacagaaatgaagaaagtttatagagagaacttggcacactccccctctgtctccttttccgtgtcactccctcactttccctttcctgtggtttcccggaactctgtcctctgaatcttcaggccaggaatactacaagttttctatcagagtttcaaccactccgtgtagagccacctttgttttgtcctaacgctaaatggtaaaaaactaaccctatcccctgttctttcattcaagtttcgagtctccttttggatattttcttccaaaattttgttttgttttgttttccgtggcagggttggatctggtagagctactcagctatactattaataatagccaaactctacagctctatgtgatttcaaatattacaattgtaaaataaactttgtgactgtaaaagtttctgtgctgtttttgctagttgctagtcagatgttataataaaataatttaaatcattaatacagctaataaaggtgagcctaccaaatacagcctttctataagctatttaaagttttgaaatagaatttttcagaagaccataaaacaaaaataggaagtaaatggaaaaataattacttggtaattcacattataaattaaggatatctgagagacgaataagtggcattacagaagccataaggtgagaagtaaatgaaaagactgtgaccttgattctaagtcattggagataaagacattgtaactcagtgtacattttctccctcaaagtctaatgtgggttggcaggggctttcctacatttggtgactcaggaatccagcttcccaccatcttgtgatggtgccatgtagacatg

SEQ ID NO: 70649 - DNA, 1230 bp, Homo sapiens
gatccgcccctcgtttcccacccccgcgccccaccctgttcccgccccttctctcttaaccccgccccagcccagcccccgcctctttccacctcccttccagtccgctcccggttcctggctccagctaggctcggcagaaataggagcgcgcaggcgcgacgtgcggctcgcagaacggcgagtagcggagcgggacccgctgtgagtgtggcggccgcgctgggttcctagctggggaaacgtgatccaggcgaagcgccccaggaaggattggggtgtgtgggggtgacttcggttctgcgaggagaaacccgtcagatatgcggtagcgttggtagcgacgctgcctgtgggtgtccggccagggccgcgtggggagcggagtgcgtggtagcgggagtgggtgagggtgggtatgacgagaaaaaaaattgaaggaatggggtttacaggctggaagtccgcacacagactgggcaggaccgcgaggcttgccaacggtgctggagggtgtcccagcttcaagttcagtcccctgcttggtgcccatgagggacgtcccaagctcatcccttcctccagcgctgctttctctggtgcagagttgctagaaacattccccgtcggaggggaaaggatttggaggcggtgggctgtcggcccgggctagtcccaaggagggcgtggcgttcgtgtgactttcctttacccacccccgggaatgtgtccctcttctgatccattgtgcccgtggacattttaacaaaggctatgactgttttgtaggcagtggcgggtgacagtgggagggggtgcgtgcgaggtcggtcgcggtgcggccctgggggatgggagagcggggggagggggaggcggcgtggggggaagtgaaaggaagagaaacagtcttcctgcttcaggtttttccttcttcctggtccgctgaatttgatcactggtaggaacagccccaagagggatatgactggaaagtagtgtgtgcgcgtttggactctggctccagccactggtttttgtgattgtgctgtgcaagtattttctacgagtccctttaggagaaaagcgaaactaatgggatttgagaggaaataattgaatgaaaggatgaagaggttgagtgacaaaacttagagcttaattatttgtctgttgatggtcatactataaagccagactttgaaggatgcgaaggtgttcaagccaggg

SEQ ID NO: 70650 - DNA, 1719 bp, Homo sapiens
ttgaccactcccccacacttccaaaattaaacagtgttttcttagcatcttgaatatctcctgcggtgtatattaacatcttgatgagacagatttccaggcaacaaaataatttctaaaatggatatatgtgtggattaatgacaggcagtaaatacccattactcctttactcatagctggtaaaattattcccactgttttattgccttttactgtacgttctacactctgtcctactcccacagaattttcaagcccttaagagtttagttaaaataaaatttttgaaattattgtcttaatatttttatataggctgatgtctttgcctcaagattgttaggaggtaattttccattgaattatcaactgtgatttttatattgccctccaagtggtagaagaagattgcaaagtccatgttatgctaggtgcacaataaatctagtaatagccccacacagatctcatcattgttgctacttccttttgtattttcatcaggtatttttttaactgtagggtttttacttttttcttggagcagagagaacaggctgtaaatgggttgccaacataagctggctgagaaataaaagaaaacaagacagttgttcataaagtttcattttgtatgcactgatggcaaattcattaggtcagttaagggaaatatttgtaccacttccaaacttttcagcgttggataaaatgattgatgaggcaggcagaaggaatgtaggtttcaggtgtgtcatttcctgctgcttccagctccatccctacagactcctccccgagtcctgccctggaaccaaaggaaggaggaacactgaggggaatcctgaagtaggagtcagatgacctgaactcagatctccctctatcacatgcttgccaccactgtaccttgagcaagaatcatatctgaccctcaacctcctcaactctaaaatggggataacatcatttgtcctgcacttctctaagggctttacaaggatcaaataagatggtgtgtatgtaagaaatttgtaaaatgtgaagagctatctacactaagttcgtaatgttattattattgtgcttcatggagaattttcccctctgttttcctaaattgtatgagagctttcacacagtgagaaatagagcaggctgccccataaatgggtaacatattcctaatctgagtgtgtgggctgttagagaacccctgccatgctctggtctgttctgaaactgtgccaactgaaagatgatagtccacacagcacaaacaggtttaagcaaatgatagaaagggaagtaaggcgtgtgtgctagttaataggtttagtagcttttatggactaaaaatgattgattgtatcttgaccctggtctcagaaatgacatttttacttttgccatgagtacacatcagatatctttggcttctatttaaagctaaaggtagaagtgtttgatccagtgaactgtgtatgtatgtgtggggtttttttctttatttttaaatgaaaattaagacaccttttgtgtggacatgtttttgtctttaatgtcaggctttagattagaccagcagttttcaaagtatggccaatggacccctgggttccttgagagcctttcaggggggactatgagatcaaaatatttttattataatgtgaagacattgtcttttcactctatctcaaaaaaagtgttgca

SEQ ID NO: 70651 - DNA, 606 bp, Homo sapiens
atgtacattacaatgtgggaaatactggtctagagtaagaggaaagcacacagtaatgccaacactgaggtattggcattactcagtgagagagtgctagcacctcagaatctgtcatagccaggaacagcttactcctgtattccactgaggtctatgattaacacccatgggcccagggccagctccacccattagctttataacagtgggcagtaagcccacaacctctgccctgaaatcagtgctcagtatctttgttgactggtacttcctgattttgacctcatggaccctgacctcttgcacctaccaatctatgttccactgacttggctgatttagctgactaccatagtacgtttaatttattagctggtgatctttgtcaaactcctgtgttctagaccttcccagcttgaatgtaaccaggcttaatgtaaccacaccttactgttgagatagtgttaaaagagcctgtgggtctttaacagctaaatccttaaattagtcataactttttcaattttaggcaatagaaattcaacttgaaataacataattttaaaagagggggcaccagtatgggtcaaatatcatgtctct

SEQ ID NO: 70652 - DNA, 803 bp, Homo sapiens
tggccctttgaagaatcacgcgtttcctcggcccagaaaatagactgggctagaaaggcgcccggactccaattctgggcccgggtggttgcagtttttcaaagggatgtgaacggtttcccaagataggacccaagggactctaggacccagaggctgcgcgcgacgcccgcagggcgaactgcatccttttgagctcccgctccatggcctgagccgtcgtagggcgcgggttcgcggcccgccaggggacggtcaccacagagacgcagccggcactggcgagcgagcgagcaggcggcgcacggagcgcgtgggcgtgtcccggcggggctgcgcagctcgccccaccccaccccaccccagccaggtcggccgcccccaccaggtccagttccagagcccaggccggtcggccgggcccgcgtgccctcggcgggctgcgcagagcgcgggagcggtttggggctgggcatgctgggagcccctcgggcaacggccgccgccgccacagccacacagccgccgccactgcgtccgtccccggtgagcgccgctgacgcgcggagatgaaattcccggcctcggtgctggcgtccgtgttcctgttcgtggccgagacaacggcggcgctcagcctgagcagcacctaccgctcgggcggggaccgcatgtggcaggcgctgacgttgcttttctcgctactgccttgcgcgctcgtgcagctcacgcttctcttcgtacaccgcgacctcagccgcgaccgcccgctcgtactgctgctgcacctgctgcaacttggg

SEQ ID NO: 70653 - DNA, 970 bp, Homo sapiens
cagggacaatttctgtcacagatgatgtgacagaattgaagggtaagcatgtttgaggtttgtgcaagagaatgaatgaagttttacaccaagtattcttagctagaagtgggaaaatagaggatttatttcactggagggtttggtaaaaattaaaaaaaacaattgtagtagctcttaggcaagcaagtcagatggatagaaggtggtggtcacgatagggtgtttgaattagtgatttcagaggtgtttattgactcttggattcctaggaaagcactcttaataactcaatcctgcaatttcacttctgctgtatttgggggcaggctgaataggctaggattcataggtctaattttatactacagttctctgaactttgataacctgatgcaatcatcttctatttgatcaggtcgctgcccagagatctactttggccagacacgttgactagattctgaaaaaaccttacttaattttttgctgttttctggaccaactgtattttatgaactaatctaatgataatagctttaattcatatattcttagaggaatattgtgaggagggagttgaagggatagctttttatgtttgtatgtggtgctttacatgatataagcttataaacttttggcacaacatcatctgttttttgcatgtgtgtactcacacacatacacagaaaacacaaaatttcagaaagtatgaagggaaatacactggaatatcaattagttgtcctgagatagcgagaatatggggtactttttttctttccatttatctgtgtttttcatgctttcacaatgagtgtaagtttttgttgcaatggagagagtgattcatcatgggctactctgggtggctgtgggtctttgttttgctcgtttgtgcatgcccagttctggcacatatgaccactcaatgtaaggtcagtgaatatgagttaggcagggaagt

SEQ ID NO: 70654 - DNA, 1135 bp, Homo sapiens
atatgaagagaatgcttagtagactattttcaattttgtttttaacttatgctaggcaaaaatttctaggcaaaaattcctttcccaaattaaagattatgaaaatacttgataactcaagattaatatcactttagtactataaagtggtctgacaacttagtcttttctttggagtccccatcaataacagggagataacaactgacatcatgggtttctggtgagggttgggaaagcctgagtcagtaagcaagggctcgtaatccataaagcacctccttgcctaatcctggcaagcattaccgggagcgggaatggcagtgccaccaggaccccgagactccgagccatgggggctgcagcacccgcgctgaggaagccaagggacggaggcagcagcgggaagacccgttttcgaggcccgcccggtaggagggcggcgcccgtcaccccatgcccactcctcgcacccaagtcaggcctcgtcctcccaaccctgccccgaccccaccgtctgatccgcgcgctcctggccacccctcccaccccgaatctcaggactttggggtggggagaacgggtcgggcggggcggatcccgggcccaggggagaggacccgggctcggaggacgccgcaccccaactcttgggaccgccctcgctgggagaccacccggcaagagccccgcgcagaggaaggcgggagtggggggcgctcccaggtagccaaggggcggtacctcgtcgcagtggcgatggtactcctccatggtagcgccggctctccctggggcggagcgacacgccggtagagcaccgcggccgcgcactggcctccggggaggccccacccccgtttatggcctagggcctttccctacgcaatccccgcctttgtgtcgcagtggcgtcacctggcagcgctgggcgggcttcgggcaacgccaggcgtcacttcaggccacgcactttttcctcgcttcctctgccctttctggaaacaagggatgaatgtaaagaactgggaatggcgccagtgtggatcagatggggtgacctagtggcagttagtctagactccgcactagtggttgagtgcccactgctgtgattacttgcacgtatttgttc

SEQ ID NO: 70655 - DNA, 1161 bp, Homo sapiens
atcctttttccagttaatcaaaaccttgcagaggagacaaatagtgatttttaccgtttattcaactggtttacacagaaagagagagaccagaatcctgactgctaagaaattcttactcttttgctggcatgccaggtttctggacttcctttctctgggtggtttgatggccctgcttactgtgccatagctttgtgggccaagacacattacaaaagaaaatcatgtttttccaactttgcaagatgctgcccaatgagctgcatgtgggagccaaattaacattttgcactctggctggggcaaagtacatgtgacaaaacatagactttagccatcccactcagcacctaatatcaacctggcatggctcaaatttgccctcattggcccttgttgtctttgatccactcaaagtggggtggaatgttgaaaccaggagtttcaacacagggtctctaggcaagatggaagaacagacagtcgccctgagtgatagaaaagataggaaagggaaaagagagaaagataacaagaaaaacattgcttacagcagagtgggggaaagtgaggagctcagggaaaccagaaaaagactcacccattgcggcgacactgaatcaaaagttcaggcggttgcttgtcagtcacgaagggatctttagcatcaatcctattagctctcaagtttcccactttgggggagaaagaaaagttccccatgtcccataattttgcacgtgcctaatcctgtcacccacaaccatgagataccaaatttcaatagacaatcttagggattgagctttaaaatgaaactaaattcttcagtgcctttttgtccccagtgtttctcagctttgtgacggagccaacaagcaaacagatggaaatcaggtggtgcatggggtaagggaaagttaaaattcccagaaccaattaagcgaggtctcctgaaagtggcagtgagccaccgcaccaggccacactggagtagattttgaagtctgaaacctagaacttgtcaaataaaccgccctaataaaaacacccctgtcaacaaagggcagttctaaggcttgaagtcagatctgaccctcgaagttgacactccagcctctttgactctcaggtctttgaaagaaaagggaaaggtcc

SEQ ID NO: 70656 - DNA, 1605 bp, Homo sapiens
aaaaaaaaacaaaaaaaacccagactgtgtaatttataaagtttatttacctcatagttctagaggttaggaagtctgagagcatggtaccagcatctgctaatagccttctggctgtgtcataatatggtggaggacatcttatggcaagagggaagagtgtgtcagctcagatcactcttcctcttctcatagagcctccagtaccatcatgggggccctagcttgatgaccttatttaattctaattacctttcaaagaccccatctccaaatcccattaacatatggatttggggattaagtttccaacacacacacgacatttaggggacaccatcgaaccatagcattctgcccctggcccccaaattttattttcttttcacatgcaaaatgtattaattccattccagtagccccagagtcgtaacttgtttcaggatcaactcagaagtccaaagtccagagtctcatctgaatcagatatagatgagactcaaaatgtgcaatttccttgccagctgcaagcccgtgagatcaaaacaagctatgtatttgcaaaatgcaatgctaagcacaggatagtcattcctattaaagatggagaaaataagcaagaaaaaataagtagctggtcttagcacgtcaaaaccccaacagggaaacaacattaaaccttaaagcttagaatgatctttcactccatgtgccatctctggaatgtactggcgtgggagggggggttggaatcttcaaagccttgggcagttccatccctgtggctttgctgtgctcagcccatgcagcagtttatacaggttggagtcttatgcctgcagttctcccaaggggactgaatacttgtagatctacaattctgaattcttgtgggtagtccttcccctgcagctccactaggcattgccctagtggggactctccgtgacagctctagcactgactgaggtgtggctcctcacaagagggcattagctatggggatctgcccgcagaccctgacctaaacgacggatgaataaaacgtacactgacacacagatattctgttttgccagtcctgctgactgtccgaccacctgcacaccaagagaggtttgtcattgcggccggccctgagcagctcgcactccaggcatttatttagtacagaattaacaacagaagctttgagtaaacacacttgtggataattaacatggttaagagagtagttctactaatgattaaagctcaggtaccgcggtttaaagtaaataccattagggggcaatagccttggtcaaccttcccccatgagggccatctggctcaaaggttagttattggaggtagggtaaacagacttaaatgaggaagactctgttgtccctagtatttaccttatgacctaattctctaatgtaagaaccggctgccttcagcctgttcaattattacaagctatgtaagctttcggccttccaaacggtttgtgactattccctataactttccctaatatgtccctttaatatttctgccaccatcctgagtgaatcccaacaactgaccttacatttctgctcagcattgcccttgtag

SEQ ID NO: 70657 - DNA, 564 bp, Homo sapiens
tctccaacattgcaactgttagtctgtgtgatattagagacttaaactatatctcagtattggaagtatcttgtttgctattcatggagtggttttcaaaacggaagcataaataatattttattggcagcaaacactctttgtttattgtgagagaatattgcagccccactgagctgtctctatatttaatagaccataaaattgaaattcccaccctgacctctaagagatgagatgagtcagaaggtgactcactctctaatcagttggaagtaaatgacctttattgtcatttactttggattgggtaaaagtaaagagcttttattgctttagcactgaaacgattacagcaaggactgacagaggaaggttacctgttataatgggctgagcaggccctgacattttctccaatcccttctgattccaacaagttggctattgtaagcctagtttttaaactctataaaaaacatgataaaagggaccttgacacagccagttaattcatttttctatcttaataatacctacaaaattccacattgttatgttagc

SEQ ID NO: 70658 - DNA, 1035 bp, Homo sapiens
tttcaaaagagtcttagcattcttcttgattcagtcttctcagagagttgattgtcatgttcctcctataccacacttttaaatattctctgaagcaaatgtatactggttgtgtctttgattaactgatttttaaaacataattcaggattgacatatttgcaatttacacagaggcagctctttgaagtagaatgctgacatgttggcacacccaggatgtacaaaagcatcttgtcgatttctgttctgggaaatcctccagagaaaattaccaaactgttacccaattaaacaactcaaaagggcaattatgaggctctcaggattctagagatcagcctgggagggcaggtatggaccatagcacactggagagaagctagatataaaggtgtgtcaggggttctcaagaccactgccaggttcagtgattcactaggaggacttaggactctgcacgcagttataatcagcaaagaggcacatggggcaaagtccaggagagatcaggctcaagctttgcaagggtcctttcccagtggagtcacataggatgcatttaattcctctggcgatgagttctgacaacatctgtgaaatgttgtctgccaaggaagcgtgttagaaactcagctggtcacataccaaatttccagtctctcaggagaaaaagaacccgttcagcataagccatattgtttgtacaaacaatttaggaacaacgagccacttttatcagttctgggaatggtgggaatcctgaaatccaagttgccagatgccacccaagggccaaatttgtaagcaggcatttagaagaatggtagtctcaggcccactatgttaactcttttctgcacaatagatgacctaagtccaataaataactcagtgaacctggttccaaatcccctaagatagacaaatgagtggattttgactacagattggtccacctgcctcctcagctacatttcagagggctacaggaccaatgtaattattttgactggcatggaaaggggtcttcta

SEQ ID NO: 70659 - DNA, 1312 bp, Homo sapiens
tatgtatgttatcaaatgtgctcataccttttgggttttcattgtactcacaaatggcccgttcctctaggttggctttttctttctataaacaataacaaagcaatataacaaaaaatatttttgtgctgttctagaaaacttaagtctgaatctttaagcaggttctagagtctgcctctagctaatgacataaacatgtgacaattacttcactttgctgagctcttgtaaagtgaggggccttagatgctgactgattgcaaatgtcctcctagcttaaaattgtgtgattaaaaaaactgtatgactcaagaattctcctcaaagaagattcatgaacgctaattggcatacaacttgtctcaacattttacaatgtcaaattggtatttaatgatttctatgttaaataatcttaaggaccaccctaacctgaattcataaatgttccctataaacagaatcattttctccttctgaaataaaacagtaactgctagaatattttttttcttagtgagagaaaggagtcttggataaagaaggaaccaagcaaaagaatgacctttaccacaataccaatttgtaaattaaaaatgtatgcacacaaaacatgtttcacaagtacacattcaaataaaatgacaaatatgtttcagtggttgtctatgttagggaaaaaggggaaggggaatggagctaaaagagaatacatttacatgagaagagccttgcaacagaccaatgatgagagtgtttcatactagaaggtatgactcagtgttctgcatgagaggttcaaaaaatgaaaataaagatgaatcagtacaacgtcattcactttgggttgcggaattccatacttctgaagttaatccagagtagtgttagcaaacaaatgatttcaaacctacaaactatctcctagcaaggtcactctcagtcaaaactgccaatggaagagattatgttttgggcttctctagctccactttcagggtgatttttgcttccttagtgatatcttctcctattccttctatacataattttgtctagactgcacctttgaagaactgatcacaacttcaaatactgctgtgaccaactttcaatcattcacacatgtaaacatacacaggtgtgtgtacacatacacaccccatttctgccaccagtgccagggctcctaactttgcactttcagcatttcaaggactgagtgctgaacttcttggttaatttcccaacggtgtactatcctggcccataccattctacttccactcatgcgggaggcagaatgcta

SEQ ID NO: 70660 - DNA, 812 bp, Homo sapiens
cggtcctctgccctcagtcattcgcgggagcgcaaccagcgatcccgccccagtccggctgccaagcctggggcctgtccccctacagggccgatccggaggcggggcccggccgcccgcggaccctccctcccggccttccgccaccggcgcgggcgcaactcaccgggcatcagctcttccggctccctcatgccacgggcagtacgggcagcctgcgccggggccaggaggctgtagaggacggtttggtcggggctaaagcagctactccgcaccgacgcgggccgcgaaagcccccaagttccgcatggcgaaactccggagatcaactacaaccgcgctcccggaagtcaacaaacagccgctacgggcaacgggggcggagcttgggaatgcaaggcgggacaggcgccgttggggaggggaacggaggccgggtggctggtaaggggcaggctcaggcacagcggaggggcagtagagaccacgcgccctctggcggcctggagcagagaggcggccacgccgcgcagtgatgctgtggagtccgcgcccttgtgccgttggaggtccaggcgccgcagggaccctgcccatgagtggcaaacgtcacaaatcccatactccgtgacataagcaagcatcgacacacaattatgacactactagtaatagtgaccagctggaacattaaaggaggtaagcactctgctaaagatatccccagcatctaaaccaacatctggcctatactgaatgctcattacgtatttattggacaaatgagtactattacaaccctgtaaagt

SEQ ID NO: 70661 - DNA, 1691 bp, Homo sapiens
tactgtgctacagtactctctattcattattacatttcatactcacaacaaagctatgagtaggagctgctagtactgcttgccagatgattcgcttacttcttaatggtaatacattgcataacaatgaaggtgacctggaaatccatgaactccttggttccctggaagaaatggtgaactccagttgaaaaattctggaggaataaatcaataatggtgaatatgtagcacctatgacctaggctccaaacactcaacaaagccccatgaaaagggcttgtttctcttgaatcttgaagacaggattcccatggtctatcttccagaccctaaataggtcccatctttacaggccacagagttgttaccagtggagcagccttgagagaagaaggctgtgtttaatcattagcttaaggtgagggcagagcccctgcttagtagatatagcccaataaagcaatcaatagcaggtcaagagcacctcccaagtagggtctgaagagaggcaccaactacaaagatggtttcaagtttcaccaaaaagtagaaatgggcagagaaggcattcaccaagcagtgacttttgaagccatccaagacatgtttcctgggctcaaggggagaatattgccatgaaaattattactgggacagtgctcctagaccaaaccctggtcagtagaaagcaatgaaaatgatctcatgggatccccatcactcaggtcctgggagtgtctggtagtcacagggagcattagggctgattgttgagacactggtgaactttgaacctctgtgatttccctgtttgctctgtgcctgatagctttcagtctgctaacaaatctcctttatgcagtttaacctctgtacttccaatggggaggaattggaatcagcctatgggagaagagatagctctaggattctgtgtgggaacttgaagagataaaagggcatccttgaaagagaacctcgtgctttgcatctcaactgcctctgacacaaggttgggtcattaaccatatttatttacccctttcttacttcataaattgtgttgtgcatttcctaatcttgtcttctgtgcagaaatttaccagatcacaaaataaaaagaaccaggtatggaaacttgagacttttgtccatatctaagctcaaaaaattctggattctgcttaaaatcaataacttccagggcaaatgattaacagaataatgatttcaatggaaatgtggtctatatgacaagagagaagcgagattatacttgaatttgatgattggcatttcacactctgttcagaattttagcctttatgaaggaccctgtctaccttcttcaaatgcctcaattgaaagggtatggcaggaaaagggatggagagggggtcagagataatcctcactgatttcacaatttcccctagggcccacctgtttgaataaatacctagtggtgatgtagcaagaaaacacccctgaatcaatatttttagacaaactaccattaccattaccatctgttaattagaaagtaactctcagatcgcttgaacccaggaggcagaggttgccatgagccgaggttgtgccactgcattccagcctgggtgacagagcgagactctgtctcaaacaaacaaacaaacaaaaaacataaaaaataaaaaataaagtaa

SEQ ID NO: 70662 - DNA, 559 bp, Homo sapiens
aatggtgacaatatttatttctctactagtattaattatgacatcacaaacatctcggctcctgaggtggccatagttggtctttaaataacactttttggtattccacaaacttctggaaaatatttacttgggtttgctaaagtcatataaattgaccagaagaggcagccctacccctgcccctcctctccttcctcctacccttcctaccttagagggctcccgcttcttcgaagccagacaactttgtctggacctctcctatgggcttgtattatggatatttgtttataaatcataccacctttactgaactgtgaactctgcaaagatgatgtcatcttccctctctgaaacttcagtgcagctcggtatctgatacagaattgactttgaatcacctgatttctaactgaggataaatgaataaatgtgaagttgcagatggccccttagtgatctgaataggctgctaggggaagagcatatggtatccccacttcccacttgtactgactgtcaggtgctgttagaatcaataggcaactatttcttt

SEQ ID NO: 70663 - DNA, 1399 bp, Homo sapiens
ttataatctcccgggatagggtcagctcctggggaaagttgcgggtttattcgtctgttttcctcgctgtacacctttctctcccttcccctaccagccggttcgcggcgcctcttggagctaacctgtggcgggctaggagaggacacgggagcgtggggtttaatctcagattcccagttattcctgaccccacggggctgcgggagggaggcaccagaagcaccgtgcctgcctggctgggcaagggcgaccgaagtctcccaagcgcacgatggggagcaggcgttgtcaccgcgtggaggcgcacgaaagggagagggtcttacataagccgggggcatctttgaggtttcttggtgacccaagagatgagtctttggattcctttcccacctccctgcatccttacactccctatctggtggttctgtcactgcatgagcacaatccgcagcgccctggcagagggtcccctccacttggtgatagagatagcgccccaactctactccccatctatccagtgctgccgccggtccttgaagctcaatgcagaagggtgacgtcacccctcagccagggccgcggggggctgcgtggtgcacctcgcggagggatgcgcctttctgcgcgggggaggggggaggaggaggagggggaggaggaggaggaggagggggctccaggcttgtgccttacctcatcctgtttggcaaatcatggaatcagtgcagggctgacactgcagtgattcactgagagaggtgcgtggtacttaaagaccattccctgttatttctcttttcatgtcggtgaccccgtcttccctagttccttacgcccataatcaagctacagctaccccgcaggggaatgaatatcgaccctcttccccccttgtcccccaaatctgggtcattttagcttctacggcagtcattttgaaatctgaggctctgtaggaaaagccagttcaacctttgcttgttttcttcttgcacccctcacccccgcccctcacccaccaccatatattagccctatttttgctttgaaactggagcacagtgctgtatgaggtaccgagaatcagctagatggcaaaccggactgtttgcaatggtcaaggaagaagcagagatttattgaggatcaaaaatattcctaatgcacccggacatttccttatcgctggcgttggtggttcttcaagtcagggaaggtatggactccccagaccacacataccaggagctctgcaatgagctaggatagattaactggcatattgcacaaggcaaacacagaaacggactttatttggactgacaacgacacaggttgaaatgtctcagtagtggaattgtgagctatgcacagatcatatcatcttatg

SEQ ID NO: 70664 - DNA, 2054 bp, Homo sapiens
aaaaaacaaaacaaaaaaaaagagatccagaattccagaattgcaactgtgaaccaagaagtggggatgggtacctcagacaaggcttttaccggaaatttagcatataggatagaaagcagagaccaaagacctcttgctttgaggctgttggcgtgctacaaggactcgaaagttatttgttcaacggatgacttctgttttctggaggcaaactgaattccgggcaggtggctcagcacctccagcctgttccagatcgggacagggaaggtgcctggggcaatcagtgaggtttccaaccttccttaggcctgggccagcccgctcccctcccatgtgaccccaggcaaccattttaatttttttacagccaagcgtagtggagaactggctgcgcgccggttgccagggacgcggcagccagcttggcggggctggggtgaaagaggacgctgcgtgggggagggctccgcggcttctgactggctggagcatcaggattcatttgcataatattttctgacggcttctgattggctgaagccagaggggcggtggtggggtgattccaagggcccagagctctggccggcggaccttttccttctggagtttccccggcgggtgtgagttgttgcggggtctgggggagctgggaggcccggtttgggaagttttgcaggcaggtgcatgagccatctttctctgaaagtgtttaagaaatgttcaagaacagcggccagagtcaagaaactgggggatgaagggttatctcgagactagacggaaggaaacgtatcaggggaggggtggaggccagaaggaaggagttaggtaggggccctctcccaagctggcgtttttgctgggtggaatccttttgctagatcccttggatttccgttttccgtgtgttatcacactgttggaactgggaagaagagaaaaagaggcaagattttggcatttagtaagttaagtctgaataccgagttttcatccgggtgcatacgtacttaaaataccaaatgggtccaggaagggggacaaagtacgctttaatttatgagaagatcagctactagaaactgtatatctgtttttctcgagttttcttcttgcagtgctctttcaatctcattggacatattttatattattttcctgcttaagcactgggggttgggtggaaggatctgtggctcatcataggcaatttccacacttttaaggtttctgactcttcacataaacacctctcactatgatgaggtcctgtatcaagtacaattaatctttgtactttacaatttacatagtgatttttatttacattatcatatttaaacttaatcaaagtccttggcacggcccatggaacaagctccatttttttgataaagaaactgaggctagaaaagtttctatgtgtgcagagaaggaaggtgaaattattttaatgcttcaaagttatataatgcttcctgcctccctgtatttttctttccattgatcttccttcaaaaccctgataggtctatcccagttttgcaagtaagaaaacatgggctgtgatgtagagctaatacgttttggggtagtgggtcctcagacttaggtctgtctccaagggtcactgactttgttttgttttgtttgttttttgtcaacagattagtccttgtggcaccaagtcagaatttcattcaaaagacaattaggaagatggttttctatggaaaatatttaagtgtaggtcttaatgtgaaagaaagagggagagaaagaaacccctttattatgttctcccttccttaggcattttttgtcccgtgggaaaaaactgtactagggacagagacctctgttaagttttagagaaaagggatcttttttttttttatttgagacagagtcttgctctgtcgcccaggctggagtgcagtggcacgatctcggctcactgcaactccgcctcctgggttcaagcaattctcctgcttcatcctcccgagtagctgggattacaggcgctggccaccacgcccggc

SEQ ID NO: 70665 - DNA, 4633 bp, Homo sapiens
cccgcctcggcctcccaaagtgctgggattacaggcgtgagccaccgtttcaggccgagaaaagggatttaaaatgagaagcttgaatcttattgaacataattgtaggactgccagagaggactggtggatgaggaatatggcaagggacatgagatgggaaaaattaaataggctgtggtttggaagtctcaaagtgaaattcaaggtgcaaggctcttaaaagttaaatccagcgattcggtacatagcttaggccctattaaatgacccagtgctttaagaactatcttttgaaaggaacacttcacacaagcaccctcaaaaataattagacacctccccatttctctgttaaatggtgaaagacacccaagactagacctaactactgtcaccctctcctggcctcttggcagccaaaaggccacatggcccaggctctccagcatcactgtgtagccgacttggacaaaaatggacttctccccattgccacttgcagatctcttcaaagaatcagcagatctgatagtgtgcccctcttcatccccggcaaccactgttaaaggaaagattgggaaagatcccaccccgccaggagggaggcaaaagcctctgacgctcccctccccccatagctgaccaaggccagggccactgcgggagcaccgcgcgtccacgtgcacccagcatgcccggtcaccctttattacgtaagagtcccaggatggagttgtacctgctgccggcccctcttccccgacggctaataataaacccgggttcctgtttcccggccgcggccactccagattcggggctgaggggctcactctgcaaccaaggcacgtgcattctggtcatcccacgcggggagcgcgcgcaaggcccgcccagcccccacatgccagccccaccctccagtcggtccggacgccgacgcctttttgaccctcgctgtgcccggccctcctcatctggcctgcccagggcttggtgctggcggggtccagctgctccaatccctcctcctctgctctgccctgccctgccctggcctgccccggcgccctccctcagcccgggtatcaggcgagaggcggagctggcccggcgcgccccgcccccgctgtagaaagggccgggcgagtgttactcgcggtcatcccggcctgggccttttatctcggtgctgccgggggaggcgggaggaggagacaccaggggtggccctgagcgccggcgacacctttcctggactataaattgagcacctgggatgggtagggggccaacgcagtcaccgccgtccgcagtcacagtccagccactgaccgcagcagcgcccttgcgtagcagccgcttgcagcgagaacactgaattgccaacgagcaggagagtctcaaggcgcaagaggaggtgggtgcccacgccccatcgctgccccggccagcttggttgcttgagctcaggcttttcggagggagaagttgtggtggtggggggacacccttctccccgcggccgtaggtgggcgaggaggtgggactgcccagccgcggggagccacccaggcgccgtcccggacgagctgtagccagagaagggggtgcgcgcgggcaagggcgccaggccccctagcagggtgaataatctaatctgttctttcgtctccgtgtatcaaacaggccagggctcgacccacagagcaccctcagccatcgcgagtttccgggcgccaaagccaggagaagccgcccatcccgcagggccggtctgccagcgagacgagagttggcgagggcggaggagtgccgggaatcccgccacaccggctatagccaggcccccagcgcgggccttggagagcgcgtgaaggcgggcatccccttgacccggccgaccatccccgtgcccctgcgtccctgcgctccaacgtccgcgcggccaccatgatgcaaatctgcgacacctacaaccagaagcactcgctctttaacgccatgaatcgcttcattggcgccgtgaacaacatggaccagacggtgatggtgcccagcttgctgcgcgacgtgcccctggctgaccccgggttagacaacgatgttggcgtggaggtaggcggcagtggcggctgcctggaggagcgcacgcccccagtccccgactcgggaagcgccaatggcagctttttcgcgccctctcgggacatgtacagccactacgtgcttctcaagtccatccgcaacgacatcgagtggggggtcctgcaccagccgcctccaccggctgggagcgaggagggcagtgcctggaagtccaaggacatcctggtggacctgggccacttggagggtgcggacgccggcgaagaagacctggaacagcagttccactaccacctgcgcgggctgcacactgtgctctcgaaactcacgcgcaaagccaacatcctcactaacagatacaagcaggagatcggcttcggcaattggggccactgaggcgtggcgcccgtggctgcccagcaccttcttcgacccatctcaccctctctcattcctcaaagctttttttttttttcctggctggggggcgggaagggcagactgcaaactggggggctgcgtacgtgcaggaggcgcggtggggctgcgtggaggagggggccacgtgtgagagagaagaaaatggtggccggagatgggagggcccaaggaacctcctgggagggggcctgcattctatgttggtgggaatgggactgggctgacgccctgcattcagcctgtgcctttcctggggtttcttttctgttcttttcggaggagagggcccgagaaggggccataccagggcgcggcgctgggttgccacacttgggaaagcagcccggagctgggtgctggggaaggcggggcgcgtagcctcccgccgccctgcggttgggccggtggaggcccaggcgttgctaggattgcatcagttttcctgtttgcactatttctttttgtaacattggccctgtgtgaagtatttcgaatctcctccttgctctgaaacttcagcgattccattgtgataagcgcacaaacagcactgtctgtcggtaatcggtactactttattaatgattttctgttacactgtatagtagtcctatggcacccccaccccatccctttcgtgccactcccgtccccacccccaccccagtgtgtataagctggcatttcgccagcttgtacgtagcttgccactcagtgaaaataataacattattatgagaaagtggacttaaccgaaatggaaccaactgacattctatcgtgttgtacatagaatgatgaagggttccactgttgttgtatgtcttaaatttatttaaaactttttttaatccagatgtagactatattctaaaaaataaaaaagcaaatgtgtcaactaaattggacaagcgtctggtcctcattaatctgccaatgaatggtttcgtcattaaataaaaatcaatttaattgatttactagcaaaagtaaattttgtgttctctctggtatttcatggtggtggatattcatctgtgcaagtatttagctttgtttgggaactaggtactgacaaaatttacttccaaactttatttctaattcagtaccaagataagaccatacatctcaacaaaaagttcagaaatatttaaaatatttgggaaggtacatatattgtatctttcaaccaatttggctaacttattggagtgcgtaattaacattttgaattttttaagaagctcaagcacaagctaaagtgttttgaggcataaaaacaaggctgaaatttcacttggttactgagaagtgaaaattagaagggaagaccagctaatcctagtgcacacaccttacaggtttttatgtttatctgagtagacatttaaatgcattacaacatgatcgatgacttctttcactagttccaaaaagggctaagctttgttgagcggcgtccagtaatgcttccagtttttcagtgagccagtctgcaattgtggacagcagttctgatcaaggctgctgtggagcccttgggaatgcttaggtgccattatgatgctctgctgggatggtgggaaaggtaaaagaatgtgctctgcatattctttatttcattatttgttttggggtataaatgtcagatcaacttgttgaagtcatgaggcattctctaagctcgtagggcttgaatttaaaatacatataagttagcggtcttaaaaaacaagcaaaatgttttgtggtgctggcgggcaggggcagttcaagtctatcagcttttagcagcagtgaaaaaaaatgtggaagtgtcaagatgggtgcttgccagttgccagagaaagttaatctttaatttgtataaagataagctaggcagcaccaaaagtaaggcatacagcctcttgtctcgtgtcccctttaaaatatcaaagtgcaagcaaaaaataaaggaaactgaaaaaaagaaaaaagctgcatggtagaaacacaaagactttcaaagactttggagccagaaactgtgcaaatcctcttgctactaattgtgtgcatttaacttcatgcctgt

SEQ ID NO: 70666 - DNA, 570 bp, Homo sapiens
tgttctgactggttatttaatctgtagattttccaggcctttctttctcctcttttttctaccttcatttacttcactgcttgttagtatatgcactgatgaaaactcacactaaaagctttacattcttgttgataacactcataaagacttgtaaagaccataaactcaaactcaaagcaatcattcctgaactaggccctgcaggaattgggaaggaggctaaaggaactggactggctcccatccccctcccctccccactgcgattctgggaggcagagtaaacaggaagtggggtatgagggggaggagtagctgggagagacactccagaacagtctgcacatgctcaaggcaaactcagaaggaacaaagttttaaaacaaaggcccaatccctccctctctcccttctctctttccttccttccctcctcagcctgttaaggtgcagtggaatcaaatgcaagaactcagatgtggttccaggaattttcaagctcactgcaaagacggagtatagacaaacaatttagcaataccatgagagagataatggagttatgct

SEQ ID NO: 70667 - DNA, 595 bp, Homo sapiens
caggtcaatgggaaggaggaatctttcttcaacctgctcccattggtctcattgctctttccatgttggcttgtgggagcagttcagggagttttgtgaaccataacacttgcttcctgtattaacagccaaagaacaattgtattctgccaggtaggctttcctgccctattgacctctgagtcttactgtggccaacacttacgcttacatctggacagagctgtggaaggtttaaccagatggacaaatcacggaaactccctgtatctccattttctcatctacaaagaaaggaaaacctaaaacctcataagatagttggggtaaacaaaaactccttataaatgtttaggtgtttggcagacattggtcatttttactatccaggcctctttcttgacctgagatttacatggagccttttatcctgtgcttctttgcagttttagaaagttacctaccataagggaattagtatggcatggtgattaagaacatacactttaaaatcagagagaccctgggtttaaatctcagcttgactattttccagctgtgtaggaagaaacagtgcttcccttggaggttcctg

SEQ ID NO: 70668 - DNA, 747 bp, Homo sapiens
ggacaactctgatcagccacttttatctcttgagctctctataaggtcaactgaggcgttcattgcagcccaatttttccatctgtccactcctgctttctgttcctcccttccccgggtgttgataccaagagaacactaataattctcctacctactaatctgtctctcagagtcagcttcccaaagaatctaaatagagatagtagaacatagtatattctaaataaaacatttattgggtctggcagtcaaagagaggcaagagtccacaagaacacatgactgttttgtgagctctaacggtcctaatagaagtgttttctgttaaatctttgtggataaaggtcagggaaggagttgcagtcggagcctacagacctatatctgttctaatcaatacagtgtcatagttaaacaaatggactttggaatcagacagctctgagtacatatgccaactctgccattcaccagttatatgacctttgacaggttatctctcgtggcctgtttcctcatctacaaaatgaggattataggaaacctacctaggttgggtgtgatggcccacacctgtaatcccagcatttggagaggctgaggcgggtggatcatctgcggtcaggagttcgagaccagcctagccaacatggtaaaaccctgtctctactaaaaaacacaaacattagccacgtgtggtggtgcatgcctgtaatcccagctacttgggaggcagaggcagga

SEQ ID NO: 70669 - DNA, 1185 bp, Homo sapiens
cagacccgagtaatccaaatgacagactgtgatatgaagctcagtgatgccaggcttctgtgtgaagactcagatgctcaaaaagtaacagagaagctctagaaaggttatttgtgcctccattatggaaacttcttctgagcttaggagtaatgttatgggagaaatgcaaataaagagtgcctgctgtctctgttctggttctttctacttcccctctgtcctcccaaggtaaatagctgatgggctgccagacaaatactttcagagtactcaaggacagagcagactaagaaaggcttagccaaagctggacagggaccaataatagaatcatttctactcatcctttggagaagagccatttctcctttctgcaaactaagagtgggtcttttgtttgttggccttgacatgaggtggtaatatctctaggtttgactcccaatttttctcttggaattgaaccttctttcatataactattttttttcaaaacaatataagaaatgcagattaattagaggagaaataggcaaaatagagacatgatatcagcaattatgggatctgtccttccatattgtcaagtgtgagatgccatatcaatctctattcacttttactattggcattttgaattcatgacagtattacttggaactttcttttatttgaactgcaggacttatcatttatcaatatttacacgcctacaaaatgtggctgtaacaggtcatatcctaggaaaggagcaatttacatccgaagttcatttggcattttatcattggttacactttctagagggcagataaatactttgccaacactgcatcaatgatttgaagcattgtgattgctcagggtgcctgttgaatcatgtatatttatactctatgacatatttcacctattttcctctaataccttgtaagtaattccttctgggaggagggaatgtgttctggaagacgtgccagaaatgtgaagaacatggaagtaaggaaaaggaaatgaataaaatatgtttcaattgtctattgctatataataaaccacagtgaaacttaatcgctcaaaacaacaatgatttattatatttcatgattctgtgggttggttggacttagctgggcagctcttctgctctttgtggtgttagctgaagtcactcatgtaact

SEQ ID NO: 70670 - DNA, 545 bp, Homo sapiens
atttgataaagctactatggcagaaactgtctattaactaaactgattcttattttttctgggcacatagacagattatccttcccatcctcccttgtggtaatgaatggcctgtaatttctagttgatggaactgagtggaagcactatgtccacatctgactcatagaaacctatcacatgttattcttcatttcttcatgttcttttccccttatggattcctggaatagaaacaacctctggggtgaccttggaagccactttgaatatagttgagcaacaagatggaaggagcccaaatccctgaatcaccacttggaggagtcccacctgaattggaaaacccatactgcatggttatattagcagtgaataacctcgtttgtgtgcagccagggaaatctgggctttttttgttgttatagcagccagtgttatctaaaacaacacatctctatttctcaaccatcctacagtttcaaggagtacaataaagttcaaatttattagaattgatattgtagtaatatgtataggtagta

SEQ ID NO: 70671 - DNA, 647 bp, Homo sapiens
ggacccaactaagctgtgcccagatttctgatccatgaaaatggtgagataataaacgtgttgttttaagcttctaaaatttggggcaatttataatgcaacaataggcaactaatacacccacaagcctggattttaatctggggtttacctgtaatctatcgacactgacaaccttctagtttcaagtagataatcttagagataaacgcatgttgaactgtttctggcacccatgtgcatttttaaaccatgaacttctggaaaaactgccctatcttacccttctggttacctaatcagtgtgatgaaaccactacatgtttgtttaaaatcttattcatgtttgaaattgcttctgaaaaaggaaaaaaaaaacagggagaggcagacagaactaaaatacgagtgttgtgttccagattaccatggctggagaaacctggaactttctccatccacatgaaaaacagaaaaaaacaacagatgctcaaagagtaacagagaatctctagaaaagttatttgtgccttcatcacaatcagttgcccaatttcaggagatgagttagggttagtataaagaacatgaagtatcctgttgatgaaagagaggataagagaagtaaacacatttggaaggtctgg

SEQ ID NO: 70672 - DNA, 567 bp, Homo sapiens
atacttagtccccatgatgctggctatcatttccctaatatgttttctcttcttgagaaaacacaccagaatgcaggtaaataagaatgatatgattatttgcattactttgaattcactttatgtattttaaattactgtcaaacatcagtacttggctactattgttaattaattacttaaggcacacctcacagtgattgtgacactctagaatgtccttggcacctctgctaagagttgctgggattattgactaactcaaggtcatgtggttaattaataatagtgctggtattcaaaccctatctctggactccttatctagtgatttctctgctacactttggagttataaagactactaacagaaatccacattcttaataaggctggggacgggaggcaggtgtaaaataacattttgcaaagaagaaaaatgtaacttatgctatgttactcacacattcaattacttatttagtcctgaaaagtttaaaggagaaacatacagtactgaagagtttctgctttgtaaactgaaccagactttgtgatctctgtatc

SEQ ID NO: 70673 - DNA, 1006 bp, Homo sapiens
atacttagcagtaggtagaaatacccttcagcctgggtcttttaaagggtcactttttaaaaatgcactagtagtgggggaaagtcaaagtagggagacagacatcgtgccccaaattagcagcacagttcctgtcaagcatgtttctgtgagaagcaaaacccagcggtcacagcaagtgtgtggccccagcttgtcagagctattgattgactgctcgcaatattgcaggtgatttaaagagttccctgccaccttgtttgtttaatgtcacctccatatgagaatgtcagcctctgacatgtttgacttctccacaggacaaatgccaagccacatgctgttgtcccaccgacagagattgttccctacccttcgtcacaacaatgatgccaacaatttctaaatgcttcatttaaaagaagcactaactaattctcgataatctcctgatcggtgctgtaacatgactccggcaaggggccaggaaagcctatcctgttcgtttttcttatctatacttagaaaaccttccaaaactgcatcacacttagtggtcctcagagcagctgctttgtgagccggcaggctggaggttggagggggcagggcgagggcacggagaggcagccgagactgtctggggccagaggccaaacttggccaacccaagacaaacacgggctggagataaaaagaggagaggaggaagcacagccagtgatggcagcaacaacacagatggaaaataaacagcaccgagggctggaaaagcaaggatcagcgctgtggagacagaacagaggggaaaggggtacaggatgaggaggaggagtagggagggtcccccctcccagtcaccccactcccagaagcgaacggtgtgaaaggaagaggagagagaaaaggacagcagaggagaaagatgggggcaggaagaccagcatgggggcagggaagagtctggaagacaaaaaaaggagaaaaggaatggaaggaaaggggg

SEQ ID NO: 70674 - DNA, 846 bp, Homo sapiens
aggtttagggagctgcggtgcgttaggcacaaggcacgtggcgcgcctcgctccagcactttgcaaacgcacagcagcgcagggccagagcggctggcccccaggggtgggggcgaccagggacaggaggtcccatatggtgtcgtcgcgttaaaaacgtaggtcctaaggggcgagccgcgtccgacctccgcgcccctgcccgacgcggcgcctcgctcgccggccccgctcgctggattcatttccatctggagcgcggcgcgtcccaaccgcccttatctcgccgccgccgcggctctgcaggcgcgggcgccccgggctccctcccttcctctcccctcccccgcccgcgcctttgtctggcccggcggcgcgctcggagccagcagggcgggtaattggcggccggaggaggcgaacggcccggcccggcctccgctaatgagcgggcggagccgcggggagggcgcggcagggctccggcgcggagccggggagggagcttccgtggccgcgcggaccccgggatggctctccgagtcccggccgccccctcccgggctgtggcggggaccggcgccctgaggggcatcccttcctcctcccctctccctcccctatcccgtccccggcgcgctccaattaccctgcggccgtgccaaggcctgcggctgcccccgggccgcccccgcgtccccggagaaatgccagggacagaacgcgcgggcaggagggcagaaggaggcggctccctgggggcttcgctgcgctgcaggggacccaggcgaccctggggcacggccaccgttgttgtggtgggggggcacccccggggtccgatgc

SEQ ID NO: 70675 - DNA, 1212 bp, Homo sapiens
ggcaaatttgagttttgtgttttggaactgtttggaatttctttttccaaacatttctaaatatttcaatttgcagttggttgaatccaagggtgtggaacccatggacatggaagcccaactgtgtacaaaatagaatactattcagcctttaaaaagggggaaatcctgtcatttgcaacagcgtagatgagcctggaggacattatgctaagtgaaataagccaggcacagaaagacaaataccgcatgacctcactcatatgtggaatctaatcaagttgaactcatagaagtagagagtagattgatggttaccggaggttgggagggcggggagggagggaatgtggaattgttgatcaaagggtacaaagttccagatagccaggaggaatcgggtttgagatctattgcacaacagggtgactatagtcaataataatgtattgtatatttcaaaataaagaatccatttcaagtgtctcactacagaaaatgataggtaagcaaggtgatggatatactagcttgatttaatcatcccatgctgtatatatatatccaaatatcacactgtaccccataaatgtatgcaattatttgtcaatcaaaaataatgttaatcataattttttttttttaaatggagtctcactctgtcgcctaggctggagtgcagtggcgcgatctcggctcactataaatttttttaaaagatgacccctgacaatttttttacctctcctccattgagaggtaggaggtctatgcctccttccgttgagtctgggtgtatggctacttgatcaatagaatataatgaaggtctgtgtcagtttctgggcctaggccttaaggaacaggtcatcttcttcttcctgtctcttgggactcctgcccttagaacccagattccaggctgtgaggaaacctgaacagcctgtagagaggcccacgtggagaggaactgaggtccctggccctcagcctggctgagctcccagttggcagccaactgcaacttgctagccatttgagtgagtcaccttgaaagtggatcatccactccaagctgagcagttccagctgatgccacacggagcagagatgagccttcctcaccaagctccactcaaatttcagattcagtggaaaaataaacattgttgttttaagccactaagttttggagtattttattataaatca

SEQ ID NO: 70676 - DNA, 792 bp, Homo sapiens
gtgagtcaaaggagtgtgatgaaaatatagattttgaaatcaaaataagtgcaaatctcatctctgtggcatgagctgagtgaaataggataaaggggaaattctcaaggcctcggttttgccatctgaaaaatgggcattgagttgagggctaaatgagatagttcatgcaaaaaggactcacaaggctgtctccttgtagatggggttaacgaacagaagttcccaggccactggctgcagggtgcgtttgtctcccaggtcttgcatggttcttggcagggatcaggcccagtaaatatttgctgaactggattacaccaatgccacaacagaggcctcactgtcaaaccatgctggggaagtagcagataaagctgtgagggccacggaaggttctcaaagggatcagggccaatagcatagaaagaggaaaaactgagtttaaaaagctcatactgcagtctgaagccccatggaggctgggaccagactcagaaggggacaaatgttcttgggtagattctgaaggacagatccccaaaatgttctgagcaacctttcagatcagtttcccaagcctggcaaattgggaaaaatctgatcaatgaagtggaagcagcagccacaaatgccacatgagagttctgaatgaactgtcttcctgttcctctcccttgcccccaccacaccctctacaccctgaattcccatctgccatgtagacatgggtgtgggaaggagagataaagtggaggttccctttggtgtaaatcctggacccagaaagat

SEQ ID NO: 70677 - DNA, 1608 bp, Homo sapiens
cactgcactccagcctgggtgacagagcaagactcagtctcaaaaaaaaaaaaaaaaaaattactgttgtttaagccacccagtctgccattttttgttatagcaaccagagctgactaacacattccctgaaagaaacaaagacagaaggactgggggagaaagaagaccccaggccatcttcacttcatggtcagtgacacagggcagaaggatgggagatgaaaggagggagggaggaaggaagggaagaaagaaaggaggaaggaagatatcgtgggaaggatccgtactttagggctcaaaggcaccttcactttcctaccccatctcatcattacttcttgtttcctccatctccccttaatagagtcatgcaggaagcccttagctactctgctgccatctgccctgtttgagtacaagcccagcagagctgcactgcagccaacatagacaatctggcaggactccaagacttccgggttaggatcccagcttgcaacgcgttactgagcaatccttcatcttgcattcattcagcaaatttttgatcaatattcattccgcaactgtggacctagtcgcagcactgagcgaggtacatggggtccctgctttcttcttctgcgggagatggacaaagaacaaataaatgtacaaatgtcaattggtagaaagtcctatgctaagaaccaaaccagggtgctgtggtggagtgcctggggagctccctctggtgaaatgtaagctgagattgggaggacacaaagaagccagcatgtgattattggaggaagagcattcaaggccaagagaagagctagtacaaaggccctgaggctggaatgagagaggtatgttctagaaagagcaggaaggccaatgtgcctggagttccccaaccgggtgggaggagggggagtgaagaatgtgataggagatgacatcacagagctcagcaggtgccagatcacatagggctgggcacaccaagataaggagttaggatttcagctggggttaggaaaggaggtgacgtcatcagattgccatttaaaaaaaaaattgctctagccataagatactattagttttaaagggaaaaataataacatagtgaagagagcaggccaacaccaccttagccaagtgatcaatgttaacattaccggtaatggaacaaatgggcatcacgtgcctcctgatacgatgcatggaggacacccatcacttgagtggcattcctgcgaaacatgcagtatctgaatctgatcacgagagacatcagacaaagcccaactaagggtcagtctatgaaatcgccagcccttattcttcagaagtgttcatgtcatgaaagacaaggatagactaagggactatgctggattataggacacacaacaacagattacacaacaggcacacaacaacagattacagtgtgcaattctgaattggatcctgaaccagagaaatatttcttttcttttgttttgaaggacattagtggagcaactgacaggatttgaataagatctggggatcaggtaacatctgtgtaaatatctgtgtatatttcccaattttgataaaccgtactgt

SEQ ID NO: 70678 - DNA, 2252 bp, Homo sapiens
tctctctagccctgagaatctatgaaagggccatcctcttgccaacttagaagcagagcacatttcctaaggaggcttggagctgagggcttggatgaccctatcctcccacagacaatccgtaagcacctagtgggtgtcaggcaccagtgggggaccagggagacaggtgagccacacagtcaaagtcctgcttccaaagtgctcacaagcttagagtaatgacatcaccaccattacctatggtgacactgtgatctgccacccggcctctcagctctcaaccacatcagggtctgtctcagctgctgagagccgcctggctgaagcaatggcctccagggtcagcccaggcccaaggactgatgactgcaaggggatcacctggggacaactcagcatccctggctgggtatgctcaggttcagggcaggtcatccctggctaggctcctgctcatcacgtggccgggtgctggaagagctgcacccagatggaagacgcgtgccagttgcagagctgcgagctgttggctggggccttggcgccctggctgataatcccacgctgtgtaaccctgggctgagtgtgctacaccaagaaggggagaagacagaatattctaacaggctgtgggcccccgccgccatctggatctcggtttcctcacctctgaggggtcttttccagttccaatatgcaaatggttcatcactcgctgtagaatagaatcagagctgtgatatgctgtccacgtggcccacagactcagggagggtctgaaactctgccagggcctactgtgctcctttcagaggagcaccaccccacccaaggcaccccagggtgtctcaggagggcggcccaggaccactccgaatgcactgaaagctgactgtgttcagtaggggagaggggccccttctctaaatattttctctccaggtttggctggagacagtcacagccggtcagggggctcaaagaggcgccaggcctgccaagaaccacctgaggatggcgtttgtgaggaaaacccagggagcagggctggcccactcccaggcagcaaaagtacggggccaccctccccttcctgggttggagccagggcacccactgtggctggaagggagaaagggagttgtgggcccaggcagcccccagaaaacagcccgcagccctccagtcagctgccgcgtgtttgttttcacagctgctcctccagctcggctgttccagtgagcaaaggaatctgtttgtctgagaaaaagaatgtggcagagaggcgggaggcagccccaggcagccccggcagcctcctcagcttcggagctcaccaaaaccagccagccacctcggggagtcacccaagagcctagatggtaaggtcacagactcagagacaccttcacctcccccggcaccctccagacagccccgctcctccgtggaccagggctttgcccagagaccttgggcaggtgccaggctggcagcctgggcacacaggacagagacccacccgcctgaggtattttatttacttctttctcattcacagacaaccccccaccacccacaccacacaccacacacaaacacacacacacacacacacacacacacacacactctgagaagaaaatcagtcagctgtgtgtatgaggaaaaagctcacaggactgaaagcaaacaagtctgcagccaggcctgccgtgagggtgaagacgagcaagcagaggggctttctgcctctctgcaaggacgccctaggccccctaccctcgccccagcccccaggccagcctagtcccatcctagacagaagaggcagagctgggtccaggtagggtgaaggcatttgccaaaccagaggaccagccacagccccctcaggcctgtcatcctagttctggagtattctgagccgtcaagcaggagcccaggcagagccagtccaaagggcattctcctttgggcggttttggccatggggagacctgggatcccaaaagaaggactctgcactcttttggctggagtgcagtggtgcgatctcggctcactgcaacctccgcctcctgggctcaagcaattttcccacctcaacctcccgagtagctgggaccacagacgcatacccatgcccaactaatttttaggtgttttttggctttgtgttttgttttgttttgttttgtttgtagagacagggttttgccctgttgcccaggctagtctcgaactct

SEQ ID NO: 70679 - DNA, 808 bp, Homo sapiens
agccccatatattaattaatgaagcaactgttagtgtgtccaacactggctcctctaatccttgccctaaaacatggcactacgattacattcagttagcagatgggggaaaaaaacagactcagaaagcttaagtgactcaccccaagtcacacagctagaagtggcaaggacagcagggctggtgtggcagctgtcacagctcacccctgagcacaaggtcaggtgccaagttcctggtggtggctctttaaacagcaagtcccagcatgtcccctgtcaccgggtctgcctgtggtctgcagcctcccttgtggagaccctgcttgtctgtcttccctgcacccacaggaacaggatcgtttgtgagcatgcctgagggaagccagggttgtgttaaactgtggctacagccgagacccgtggacattgttctctttcagtttggaactgggcctcactccagagctcggtgcctgagcctgagcctccactcagagacaagctcatcagctgcaagacagtcagggaggtgcaggcagcccccgcagcttgtgaatcagtgagtgagcttagatatataaagaaccccggcaaatgatgaaaaacttctgcagatggctggtggtgatggtagcacaatgtgaatgtactgaatgccactcaactgtacgtttaaaaatggttaaaatggtaaatgctatgttatgcatattttatcacaataaaaaaacaccccaaaacttagtggcttaaaagagcaatcatttatcagcccatgattctgcagatctgcaatttgggctgg

SEQ ID NO: 70680 - DNA, 1048 bp, Homo sapiens
cttgctctcactctcaacatgtgaaacattggctccccttcgtcttccaccatgattgtaagctccctgaggccctcatcggaagcagatgccagcaccatgcttcctgtacaacctgcagaatcaagagccaatgaaacctcttttctttataaattccccaatctcaggtatttctttatactgacacaaaaacagcccaattcacagcctgtctgcattgactccacttctatcaccagccgctgggagaggtgggtcctgttttactgaacagtgtccctaacatggccgcccttccttgtataggccccagaaccttccagggttaaacaaaagcaggtttccaggatggaaaagctccaggcagacatgagacgctaaacacccaaactttcctcctggaattccccttcctcttgcagtttgtaccttgataccaaaggtcacccctaggagaaaacacccttcatgactagtccttcaaaggacagagtccttttctttgtttcaccttagcagagtcgagacaggcagataaaaatgtcttgctttgttaaagaatgaaggaggagcagaaacataaggggcataaaatcatgttcatgagtgaggcacgtctggacacacaggggcaactttgattccagacctgcctcccggagtcagataagggagctgaagtgccagccagtggcctcagctttcttaagtcctcctactccagctttggacaagccaatgccatcttcctccaagaggcaggcaccatctcttttccagggcctgcggggagcagttcccctctccttctgcctcaaggatggcacctcccagcttccctaatctctcccccttagtgtgggggtgcagctagtctgtggatgatttgcaggacagtggtggttgacagccagcaaataatagagctccctgggtctgtgttatctaatccacctacccctggagcttcccttagcaactcactccggaagcacccctccccccacaccatctggaagtggtttcagaaaaacctactcattat

SEQ ID NO: 70681 - DNA, 2411 bp, Homo sapiens
tgatgacacaaccccttcgttctcaaagatctgtttaaatatgtaggtggtcttgcttgagtcaactggtttttatgtcagcattgacctcagtcctgagatcctagattgcccagctggcagagcactggagggtagagctcgctgcaagtgaggccagcccacccccagccttctgatgggccactgaggccaccccgttgggctggtcatctgcagccggtgtcctctcctgacctctgctctaatctcaagggcaccctttatttagacaccacagtccagcctgagcctcaagtcctcgattcattggctggacatgagccagggacagccacaggctggctccagagggctccccaaaagaggccacagaggccccaggaggcaggctctggccgagctggaacagagaacggaggtttaaatttccgaggcctcagttcgaattccagctctctcactggcgatgaccttgatccgtggggtaacttccctgagcctggtgcctgcatcaatcaaatggaagaggagaagaccacgtgaacgtggagcagagtgagatgcaaagatgctggccttgacgtttgtagtgattagtgaggcagccacaagccaaggaaggccagcagccaccagaagccagaagaggcaaggaacagatttttcactggattctcatgagaaagtatggcccagtgaaactgacttcaggcttctagcttccagaaccataagagaatatattcctactgttttaagccaccaaattgtggtcatttgttataggcagccataggaagctaagacagaatttacaaagggcctccgggagacctctgtgaaatggtactagatattgacttgtattatcttaatgggccctgacaacgagcttttaaggtagtgggcaaggcaagccttgtcagtgttttactgattaggaaatggaggctctgagaaattaagtgtcttgttcgaggtcacatgttgtttggtggcagagctgggactggaacagaggtgacccagagcctggtgctggtccctttccaccacccgccatgccctgtgcccaccctccctcctctgaccaagtctaagcaagtggaaaggagggcttggcctccagtgggagcttagcaaggcctctcaagggcctggaagacaaggggacccttctctagccccctgcctggccctgggtgtttgcatttggacatgtgctgtggcagaggcatcacgggggcactggatgctccatctggagttacgtctcttctcctagaggaaagggaatccagggacatgaattctctctcagtgactcacctctgagccctgtcaggtctccccgggcctcagattcctctgtggtgacatggaaataataacagggccgccccctccttgaggagctgtggaattagagaatgagcctgcacagaaatgcccacggtgagtcgattacccagttccgctctcctctggcccaagcggtggccccgagagtcccctggaacaggagggcctcagggaaatttgccaggggcaccacacagagagcacgccagggaggcgttgctcaatctctcacccacgtgggccccagggaaagcccgcagcccagccatgactcctgaactgccctgagagcctgggacaggctcgcactgcgctcactcatcctctctgtctctctctctctctcatgcttttcctttattttctcatgctttccctctcttgtgcccacactccagaaatatgtttcccatcccctcatttccctgcattctctgtcctcctcctcccgtcctccttgcttgctggctttcacttactctcttcttctccctggtgctctgttccccgctctgtgccctctttcatgccccctgtccatcaccccgccactctcttgctgtctcggcttactctctcctgcttgccctcttgctgccttactttcctctcttgccctctcactctctgactcttccgtgctctctgctgccctggaccctccatggcccccacccccgccctgggatcaggctgaggccaggcttccgctgagcttccctccttgcttcacctcttccctgccgcgctgctgccctcgctctctcgctggcttctcctgcaaggacttgctccataaagcactcacacgggacttccccctcaggctctgcttctagagaattctttcttttttttttttttgagtcggagtttcactcttgttgcccaggctggagtgcagtggcacgatcttggctcactgctgcaacctacgcctcccgggttcaagcgattctcctgcctcagcctcccaataactgggattacaggtgtgtgccaccacgcccagctaatttttgtgtttttagtagagcggggtttca

SEQ ID NO: 70682 - DNA, 1328 bp, Homo sapiens
taagacacacaggagcctgctggagggtgagggaggggaaaggggcaggacagccacctgtgcccaggagaaccatctgcctggtcactcttagcccaacaaatggccaaacaaagatgagcttctgagtgaccccgacaactgaaagcggccaaggctgaagtccacggtgggaagccagaactttgacatccactagcttacaagtcaacgttgcattctctctctctctctctctctctctctctctctctctctctctgcagtcaggaacagcactggaagccaacaggccagatggagttagtcctgaagtcaaactttcagaaagaaaaatgtcttagtcttcaaggtgagtgtgccagttgcctaccagcagatcagttggtcatagtggaccccagactgcacaggctttggaaacagtctgctgtttagagagtagtctaggttcactttggagggcttctggagacctgcttccgtgtcctctttgtcccccaccccaccccaccacctctgccaggcctgccccttagcaaactcaacccttaagcattgaagcatactagggctccttggttcttaaggtaacttgagatccctcaggtgtggcatttaaaagcaaaggttctagatttggacaaatttaggtttgaatcccagttctgcctcctactagccgtggactttgggtaagctatttgagctctctgggtttcactttccttatctgaaaaatgaaactaatagtaatacttatgcagggtggcattgtaaagtttaaagaacagaagtgaagtgttcagggtttagcccagcacccagcacacagtagacactcaacaaatgttggtacctccagcaccccagaattctagcctgggacaatccagggcaggctggctgaagctcaaagcagcaagacggccgccaaaatgtaatctactcactggctgattctccaaaataccctcccagtctatgcatcctgggctctgtccctaagaggaagccagacctttctgctcaccaactcgtccccctgcaccttcctgattgaagccacattccacgtcatgcctgtacatcttcccctcgcccttcagacccaggtaggggcgctccctgagcccccagcggggggtggggcgggcacccattggcagagagcagagacgctgggctcctgacctcagcacacataggtgatgctccaagggggctgcgctcagacacatcttaaggggaaaccacaagactgagccattgtgcttattggcgccataaatcaccaacggttcctatcttgctgcacctccctgccc

SEQ ID NO: 70683 - DNA, 752 bp, Homo sapiens
tttgtcccttggtgattaagagaaacaggaaagaaagaaggaatagctcgggggaggtggaaggagctggcagtaacatgatgggaaaccacgcacctttgcatcttagatgatagccagcctctgctccctctggggcactaaagggctcagacctacatttacacactgctgcactcaaaaggagcaaagccaggagttccaatcgaaccaacctcgcttggccagagaacgtcacatgcaccctggcaggcaggcaggcaggccgccagaagctcgcggtttgtttagacagcacaggtcactcctgtccacacccaaggctgacgcggctttataaacactgagcacagagtgcggtctgtgcagcagccccatcagagacctgcactgcaccggggcagggcactgaggacaggttcagttgtgagttcagagggagccacatttcttcacccactggaagaactcagcttaaaacaaagtgtgccaggaaagggcccattggggtccccttagcagcccccacaaagccctgggagcgctggactgggaagcacgagatgaaggttcaaatcttaccacagctcgtaactggttgtgtgacgtggagcaggtcacttggagcacacctttctgagccttccttttccaaatacagagcttagactactggctccaaaagtcttatcgttctggtggatcatcaattcacatttattcaatgtatgaatgaacaaatgaaggaagga

SEQ ID NO: 70684 - DNA, 3330 bp, Homo sapiens
gaagcgtgggcactatgggagaggctgacgctctgtgttccccagcgccctccactcccaccccttcactgttttcttcgacattatctccctagagaacacagcaagcaggagcgggatccttcgactcggctgactctcaactccttccaaacgtgaggctgacggggagaactcctgctctgcccagtttccattcccgcctccagaataacgagccgaaaacatgtgtactgtaaataaagcctgtctaaataaagcactcgggtaaaggctaccgagaaaacactccgcatcgctctgtgctcagagcgtgagtcagcttcccagccccgggggaacaatggggaccttgccaagggtccccttctgtcgacccctgacggcccccaggcccgtttgggtggcgggagtgccggcaccctgggaccttcgggcccgaggttcgggagggctaagggcgctccaggcgaccagggttggggtccagccccaggattagcgcggccaggaatccctctgcccgcagctgccgcggaggggttgagggttaaacagacaccgggcagaggagcgagcctgccggctgcggccggcgcggcgcggcgcggggagaggacgggagggaagagggcgcacgctacctagcctcccgacgagaagacgtctcctccccacgtcaggccgggctctcgcccactcggctggccgcctctgctccctggcctctcaagtctcagcggaaagaaacgtagcggctgccaaaagcaccccactccttttattgtccccataagcctatacacgtacactagccacccccccaacacacacacacaacacgcacacgtgtgcgggagactcgaggatgccctgcctccatcgctcacagagtgagtaccaaggccgagcgaaacggcacccctttggtggaagacacagtgttgggaccagtggtggcctccgcgctacgtcttctatcgcaacctctgggtttcctttgcagaactgcataccccagagcagaggccatgtggagacctgcggcttggtcccgactggtgcagtggcctctgctctggtgtgggctggcggtttccccgcgcccggtgaccttaagggggtttccggagtcgcgcagccagcccttcctcccagcttctccggccaaggccgctctcggccgcccagcctggtcgggctcggctagtcggctcctcgccccgggcaggagtgcggttggtgaaagcactcggggcctcacccacgctctgtgcacacgcgccccgccggggcgggagccggagccgcgctccaacagcccgaaattgccaaatggtcgctgggcagggttggggatagactttgggaaccgggtttgagctggagaagacgaggaaaacgagtgaaacgggagaggcggggtggggtgacggctcataaatcatccagccccaccctcgggcctcagtgcagaggcgccctagccccacgaggaagaggaggttcacccagccactcctggccgacctctgagctctccgggagccagcgccccaccctaggctcaggccgcgctaggaccagctcccggcccagatcgtaaaccacccgccggaatcggcggaaagccgcccttggacacagcgcgcatccgcccaaggggaagtttatttatagcttgtaaacgtaaaggaaaccagaccgcgctacctcgccgcgctccggctgcttcgctccccacctgcccaccaggagggcgcgacgggtggagggaggtggggtttggttctgtgccccccctcccccgctcccgctccgctgccaggggagaacagggtcctaagaggctggcaagccttacattcctctcgggacgcctatccagtgccatgaaagccggagggggcggaggacagggcccgggcaccggagtggttagggtgggggtggccgagctggcccacttggcacggaagggcaggcaggccaggcgacgcggcgcgagattccacagctcccgctccggaccgggggaaatcctggagtgccagagagcccggggagggggcgctccgggagcctctccttgaaaggcgggatgctttccccgttcctcccgcgcacgtgtcctcagcagagcaggcaagcgctgcgcgcctggggctgcgatcctcgggtgacagcgactgagagcgcgccctctccacccccacccccgccgtcgccgcctctcctggggagctccagtctccagggtgcgctcggggcaggccccaagagccagagaaacggaaaagtgccggggaggcgattaggaagagaagacattaaaaagcccagccctgaaagacaggcagccgagctgaaaaagacgcctgcgaacccccaccccgccgcccctcgcctactgcgcccagacggcccctccttgtcccggctgagcgcacccacccccggcctcggccggggcgaattcgtgtgtgtgtgtgtgtgtgtgtgtgtgtgtgtgtgtgtgtgcgcgcgcgcgcgcgcgctcgagtgccgggagggcagttgcgaaacgggctcttggctgcagcgcggcataatggaggtggctggaacaatgcgcgctttgtgcgcgcggggagttgttttccacccgcctcgccccccttgctcgggccgtatggcactttaatctccgccacgactcggcacaaatgcacttgtgtcctgcgggtcactgggggccgtgcggctggagccgcccccaccccgacccccgcggaacccaccgccggctgccccatcttccttcctgagcaccccccaccaccacctcaattcccggcgtgggccggtgagctggcgtggaagcttccgggcccgccggccacttttattttccgtgaagacggcccctcccccgctccacgagcgcgcgcgcgcacacacacacacacacacacacacacgccgcccgcaggccccacactcaccgccctctctcgcctagcctctcctcggcccgcctccgcccccgcccccgcccccgccccgcgctccggactcctgcgaacaatagtaaatgtcaacagattccgcgcggcgagtgtctgactcggccgagataagggtgcgcggttggccccgcgctcctcgtcgccgcggggggagcccaccctgaccccggctggaaggaaccggctgtgactaaacccgtgccgggagaggggggcgggagggcagggcaccagtcccagctcggtggggcagcctcgccaggagaccaggccctgccccgcccccaccccacttaacccgttgccgatgggggaacctatg

SEQ ID NO: 70685 - DNA, 659 bp, Homo sapiens
cacattaaaaaaaaaaaaaaaaaaaagccacctctgtttttaaaagaaactagatgcaaagagattagcagagactctcctgaaagcctgatcccaggacctcacacagatcagtgattaacctctggcccagaagccaagggaacggtggggagaagaaacaggcctggtggggtgtgttctcagcaggatacagaggcctcctacctgtgtccatggagctgggggttggggttggcagggagaagatgggtctctgcccaatctgagggaatgctatttgcaaagtgtgaaacaccaaatacatttccgtttggctatttctgtcactgtcaggaaacccccagtgcccagcctcatggcagcatcccactcacacaaccaggaagatgttcaggctgactcagacctgggtctctgaccaataaaccagggtcaaggacagggtgagggccacggctggggatgtgggtggcaatggcaggtcctgctgaaccagcggaggggcagctggcactctgtgtgtactcctgggactttcagctcaaatatattttaaatacagtgacttcatagatggtgatgaagagtccagggtcttaaaaggcaacacccccaattattcatgcaggcctcaacattttcagaagctttggttc

SEQ ID NO: 70686 - DNA, 516 bp, Homo sapiens
gcagaggactcttcaggggaggggtctcgctactgcatggctggttctctgtggagaacatggtcaccacagcctcccggctcccaccctcactcaccgcgtgtctctgggcaggtggctgaacctctccaaccttggtcccctctgtaaatatttggcactgtgttttccaaaggattaagctgcactatggacttgagttttgcctggcaatagctggcgctggccacgtttaaccccgctaaatagtacccgactccaataaacacactgtgtaataagccccagaatcacaacacagtttctttggggcactaccacctcatcctgcgggggaggctgaggcagcaacagagaggggatcagagcagggagggaacttcagcagaactgtgtagattttacagaagcccaaagctcaccacccgccagcccttcctggggttgctccaaacagagactgcgtcacagcagcagcgctgtgctccgggtgtcaaggaagggaggggtgaagaa

SEQ ID NO: 70687 - DNA, 679 bp, Homo sapiens
agggaggtggctggcccggtcccacccctcccgaccccctcccccgagagagttgggggtgagggaagtgatccagccggcccaggtgctgcctcttggcacactccaagccacagccttagccgtagccagcacgggcgtccccgcccacacctccaagttttgcattagtaagggggagggggaaggggaaactcgccggcccagaccattccagcacccagaaccttcccggcctcctcccggggcgtcggggtctgagcggagagccacctgggctgggagtgaacttggccccggcgaagaagaaagggggaggggcgccccctccccgggctgaggcgcttcagcccggagcgcgatcggtcggcaacaaagggattttctctcccaccacacacacccgtgctgctcggggctcgcccgctcctcctccccgctcctcggcggaggtcccagcgcgcggggccgcaccacggcacacactcacgccctcgcggcgcgcccccgccaggccttccaggaactccagcagcctccccggaggcggcccgaccttcccagttcccgaccctaggtaacccctcggaccctgcggcctggcacgctctccatggtgccccttcccgaggccccgccgcaccttctctccccatcaacgaatctgacgaaaagaaac

SEQ ID NO: 70688 - DNA, 3654 bp, Homo sapiens
ggagagaatcgctaatgagctgtgcagcccattgatccggagaacacttcctaattaactctcagtcacctactggtgacagcgcctcaaaggacagcgctggggccagccgagccccagccgcgacttgccggccgggcgcctgctgcccaaaacccgcgcgctcccctaaacaccccaaggcaattggtgtgcgtggcggtgtatacccgcacactgaaggccagcctcggattaaacctggatggcatattaatcatcgccttccccccccactccgctctacgcgctgaaaccctgcccaaaataaacacgaaaaccaacactgcaaaacccacaccagataacaggtcgagagaggagtgggcagggtcaaggaacgagcgtattccctaagtgtccacgtacaggaatctttgaggctgacaattaaaatgccttccacgcaagcaattctgttggcaaaaccgaacccaacacttcgtaaggattgatttcggcccgcggtgtccgtttccagtgccacaggaagtgtcagatggccagaaatacccaagtctgtctgcactcaccacccaccaccttctggggtgggccatttcctcctagtctttactcccaggccattttaaggatctttctccaaaagactacccctagaaccaaataccacactacccctcctctagcgtcttctcaaaacgaaaaaagggggggaaaacacagctaaaaccccgagctgtctagtctagacgcagcgaggctgtgcgaatacctatttgaagcgcgttggtttctttttaaggtttgtttctaaatacacataaccctcctccttccttcttcgctcttccattccccccacccccaccctccagacgccggcggcgcgcgccctggcgcgcgggcactcacagcctctagctggagatcgcggactttctggaaaagattcattaacagcaaattacgcctcgcccggccacggcctacacgctgccagactcgtccgtctccgggaccccgggaagggcccactcgagcgtgcgagcggcgggaagcccgccgggaccacgcgtgacttcggccgccctactccacacacggtgccccaaggctctctccgtaaacagcaggcgctcgtcaccgccgccgcgagcccccgagttggcggaggctctgcggcgcagccgcccgccggctccgagcgcgggccccgcggcgcctcgccctccccgccttggccgaggatcttgccccggtgcgcaagttcctcttcgcctacagcctccttgccacacgccctccgagtgggaccaacttcctccggccgcagactttcacacgcccatcagggctacccaccagactccccattgcccagcggagggcccaggtctcgcccgcccccgccctccctccacgacgctgcccccgcacaagcacattctacacccacccctgggggctcataacttaaaacctacgctgaacatcggggagggagaggagggggaaagcgggagggggatcgcagattataatcttaaaagaacatttacaaaacaaagcgtctgacctggctggcgggcgggccaagtcggaaccccttgctctgctcgatttcttagtagtttttttttttaatccacgtgattcgtgctttggggcaagccaagaaaaaacgggactcccctcccgagttgcgcggcagcggcggcaggtcgagctcggctcggcccgaggcactcgccacacaccctcgcgcacgcacacgccgacgttccacttggaggaacgaccggcccccggagaggcgagacgaggcggcggtggcggcggctgggggtttttacagttctttcccgagtcgaaaaagaaagcagacggcaacccgctgccctccccttcctgctcgcgagctaacgccgaacccagcttcccagcttccagcccacctcccccccctccgcccgactcgcggcgctcagcggcgaccgcgctcccgcgcacagacacacacaggctgcaaacttccactctgcgaactccctgctctcctcctggcccaccgggaggcgccaggcccccagccgcgccccctccctccctggtgcccacgcggggccgcttaggttggctgcattttaaataacatagctatgaaataaaaacgaaagcgagccaagcagccaaagggaagcgcgaggcaaaagcttcgcggggtacgctgcgggagggggccccgggagagggggccgactgcagccctcagcgcgcccgcccgcccacccgtccgcggtctcccgggggaaaggtgttccgggcactgacctgaaatccccggtgggggagtaggcagggagcctgcgatccggctctttgaagttttcccccaagcggactcgaggcggcgagaaggagcggggggcggttgggtgggtggagagagatatgaggggtggggggggttggcgacgttaacgagcggagaaggagccgggccggagaagcgcggcgagcagcaaagtttgcggtccccggctgcccgcagcccgctcgcggcgccgcgctcactcgactccctcgccgtctgctggcagccggctgccctcggggtcggccccgccgaggggtgggctctgggccgggtgggggcggggcggggcgggctcggggcctccgggcaggtggcgacagccccgtgcgatcctccgggctcccgcagctggactgggcttggccgagctcagcagctcccgcgctgccgccgccgcccgcgctcgggcaggagccccagcgccatgttgacggttcgccgcgagcgcccgctcgggctgggtgtgtgtgagtgtgtgtgagtgttggccaagtcgtccctgcgcggcgacagcgcggcttgggctctccgcccggcggctcgcgggctccccctccgccgccgccgcccgcctagctcccgctctcggtcgcggtctgggctcctgcgcgtctcccccgcagccgccgagctcggcccgcgttcagcgaggagcgcagctctgcctcaccttgccgctgggagcccaggctccgtctgccgccgcacgccgcgatcccaacgcgtcccccctccctggttccctcctcttcctcctccccctccctccgcccgtcctccctcccgcccgccctacctccctccctcccaacagccgcctcccctccccccgcaggcgcagcgctcgggcgacagccgcccgcccgccgccgcctccagctctcgcaagtttgagctccgccagtctccgctcaccctccgctgcggcgcctccgcggcggggtttcgggaggggtgattccccaggaaaggtttgcccgagtttccccggccgtcatcgatgcacggcccggcacgttttggcctctctggatccgaaccccggaccacttgggtggcgccccccctcctcgtcccccggcctcccctccccagctcgggccgagttggctgcgcacgcccgacccgggcgcacgtcctgggcgagccggagaccgacttgggcggcggcggcggcgagggctgccggcagagccagagccgaagggatgggggcggcgggggcggctctcccagccgcgcgccgagactcccctcgctacccagaaggccag

SEQ ID NO: 70689 - DNA, 6043 bp, Homo sapiens
aaagggagagaaaggaaatcacactccctagaacccgaaagctcccagccgaaccggaccctcggggagttttagaaatccttctttccgcacaggaatttcgcgaaggggtttccggaagactttgtcgaggaaggttttggtatcagactccacgacctcagagcgccctgcaaattccccccggcccagtggctagccccagaatgcaaacctcaaggcgggcgccccagaccaagctgacctagcctctgcccacccccagctcacaaccccgaggctcccaccccctgcccccgaccgggtcggcaccgtggcgtccggcacatgccaagtctaccgtctccaagccaggctgcaagatccaaaggttggggcctgccgcggacggattgtccctggggagctgaaaccgcccagcggggaaacccctcctctcgcccttccccgaaaagcttggccgcggtctaagctccgagcaagcgggtatccgctgacagccgggcctcacgtaaggcccacacgcgtcccattagtcagcccgagttcccctcgggcgagccgcctggcgcggccccaaggccgggctcaggcggggagagggtgcggggccgcagcgagctgcgggcggaggtgcgggctccgcggagcccggccaggctcggttccgcgttcctgggcccgcgggtaagctgagtcggcggggcaggccgctccctggctggcgccggggcgccaagctgcgcttcacgtgcccgccatatcagcagcagcggcggcggcggcgaggagggggtgctgggaggcgcgcggccgttcccgcggggtctccggaccccgcctccccgcccctccccgtgggggctgggccgagaccaccctgcggcccccatcccagcgcaagccgaaagcggcgctgccagacgcagagaggctcctggggcgccgttccgagagccgcgcggcggcagcagccaggggagggtgctcctcgcggccgccccgccgccgccgccgcagtcacggggaccggaagccctcgcgccgccccgagcggcctccgctggccccagggctgttccagacgagggctggccgcgcgtcacccctgatccctcctcgccccaggcgaccacccgggccctgcggtatcccggtgtaagccgagaggacccttcctgcggtccgatgagatgtccctgtccctctgctaccaccataagcacgcccccccgcaccgctcgcagctccgcagctgggaccggaggggcgcggagccgccactccggccgggcaggaacacctgctcccaggccctgcagctgggcgcgtgctgctgtgagaggctgcctactgttgtgtgcagagatcgcggaggagaaaatagggctccgaagctcagggccaggagcagccaagcctcggccacccccatctcccacccactgcaggcgacagagcgcgaagccagagggcctgctgggggcccgggtctcctttcgaaggtcgaagggccgccacccctgggatccggcttctggcctgaagaggtcgttcataaaacagatggggcaaaacctgttttgggagccttcccagtgtccgcccccgctctccaaaccagacacactcatctccccctcagccctactctagcctccggcgggggacgggagtaggtcatggcggcaccggtactccacccgcccccctccacgtagggacgtagggtcggctgcggggctcggactttgccactccacctagggaagggccaatggacgctccccgtctcctccgtgtccggaggagatccggcggcggagctgacctgcaaggcttgccctgcctcacccaccccccacctccgtcccaccctccccgactctcctggcccagggcccggcccgggaaggcgttgttttgccagcgggagccgagcgagtgcacagagaaaagcctccctactctaatgagagtgcacacagcgctgcagcgaggaggatgattacccggcgggcggggggcgcgggctcgggccgcgggcggcgtgtgcggcggccccgcgggcccggagtccccgcctgtctggctgctaatcgcacgctttctgctgttacggaggcaggcgggagccggcggccgagcccagcgccgacgactcggcgggtgacacggaaacatggcgcagcgcccctcccccgcccgcgctcccgcctcccgccctccccgcgctcccgcctcccgcctcgcacttcctcccgcccgcgcggcttttgcagttttaatgctctgctttcggcctggcaccattacgctagcagccgcttctccgcggccccgcgcgtctctttcccctttgttttcggggtctatagaaaacgtttgcttttgtcccgagctctcgttaaaccaaacttgtggtggcaacggaaggcggtgcaggcggggaggggtccggggattttggcagtagccggccagagcgtggtggaaacttctctcgctgggttctccgctccctcccactccccctccccaacacagagccgccggcctcccgacgcttctcccttcgcccccgagaggccccagtgctccaggaaggtctgggccacagagactgtgaccaggggtgaagaactcagagtgcgtgtctgtgagccccgaggttttggcactcgatgaccttgctccctgcagccccgacttacctctttccctttggtcattcggggctttgtatcagtcggtgaagaaggggagggaagagaaagtgtttctttcgtgcgtgtggtttttattttaaggatttgttggaatctgtcacccccaactgcacagccccctcccgtataggatctagggcgaaagcggggaaacgtcggatttagggggaaagggtcgggtcagaaacctagccctggaggctggatcgtactctcctggcgggctcagccacacttggtcggcacgcggggcggggcgacccagcagagtgggggacgcaagggccaggtccctcggtccaggagacgccaaacgttccaaccttggagcgagagagcaggaacccccgcccccacccaagcgcgcgcgctccctagctcgacgcgcaagccgtggctctccgcgccagagctgctcaggcggcaattttttaagcctgcaattaagcgaggcgtcgccgtgtcctctgctagtgtcggtcctgtcagtcgcacatggccttggtgctccggtccgaggccccgcgattagtcacaggctcgcttcgctccttccctaatccgcctctgcaggcagcctggggacgcggccgacttggcggcgctggcagggagccactgcccgcggggcgggcctcctgaccagtgccagccccgctgcgcccgagccggcgcgggccctggggtgcgggtttggcgcccctcccctctcacagccccctggctggggtggcggcgcccctcctcctcccgcccctctcccgggcctgcgagatctatttgtgtggtgtcatttgcataaaaataggacaagtgtttctgtgcgttcatacgcgggaggcgaaatccttattgatgtgtctgtgtggagccttcgattgtcggagcggtttgatttagggtgtttgtgttgccttctacaagaaaggagagaaagtccttctcaactccttcggcggcctgggcccccagaagcatgtccctctgcgcggccggaatggtccaccacttgggccccaagcgcgccggatccacagcgagcaggttgagggccaggcgggaggcccattatgactcataaaatcgggcggcctaatcgccagctgccaacccatttacatgtggagcttcccaatgctcccttcgcccgggcccggcttcctgagggtttgccccgacacagctagagccgccaagtgggagctaatctagtggcctctccttcccgtcggcagcgtggcttcccttccccggcgacccccgctctcttggcctactgcgctgctcgccagcaactcctcagcttggacaaatagctgggagggcgccggccgcgcggagccagtaaatcaatcattaactcccaagcgaggcctggaccaggggagggagcggcggccagagccgagtccgcgaggcgagcgcaaagcctccaccggggttaggagccacccacgcgccaacgaaccgggtgcgtgaaggcgggtcccgccatggcctcccgggcccctccagaagcctccgcccgccgggcctttcaagcccgcaccttgcctggccaggcaggtcgcgttacagcgctgcccctgggagagcttgaacattaacgagtcgcctcgggcctcagcggcctgctctccacaggagagcgtcccgcgcttgggcaagctcctcggatccggccgggctcctcctggctcaggcttgctaaaccaaactgatcgcaccctgtatcgaccaatctccctgcggcaccctcttccctcagcccacggtggagccggcacgcagggggttaaaagccccggttcgctctggctcctcggctgcgaggagaaaacgctgatcaaagtgcttaaggggaaggtaacacatgcacattcggtcccgggtcgaaggaggccgactggagacggctcccgagccacccgcctcgacccgcttcccacactcccgggaacgcggcggcggcggcggccctggcccgcacgattcgctcggcggagcgctgcgctgctgggctgggagggcggcggggaggaggagagacgagggggcgggaggcgaacccgggctgcgcgccaagaggcccggagccgcagattagtcaccgctcggctctgcgctcccgggtgcgcccgggaaccgggagggcaggcgtcggccccgctcagccgggctccccggtcctcggcgcgggtgcccccacccccacccccgcgcgctcctggcgcggctggctcgactctcggggacccgcgcagccgagatccacttgtcaggtcaagggcaggacagaaactctgcaagcggagtcttgcttgcgaacaggaaatttctccttgatgaggtgctgcccctcccccacgccgggcttcaaaacaaaactccagagcgggcggccaggtacccagcctcgctcgccatggccggcgacctccgctcctcggccccggccccgggcggcggagccaagccaacagagccggcggacggactcggcgccggccccgcggagggcgccaggctgccaccctccggggcccggacggggtcggcgggggtgcggagccccggagcccccgcgcctccccaggttctacagccaccgagcggttttgcggagctgcccgaggccgccgggtcagcggctccccggagggcgtggggggcggggaggccgcgcggcgccgccgactcggcgaatcccgctgcgggagcccgggagggctgcgagctcggcctggcaaagttcctgtggaaactccatgttttgaaactcctgcggcgtcgcagaaggagggggagaggggagcgcgggaagcgcgcgggggcggtctgcacccgcctctccccgccggggagtgggttccgcggccccccgggcctcatgggaaagctggagggcggggacggccgggtccccgggcccgttcttttgtgtgttctctctctcttccacactctaagagaaatttataaacccgtttcatttaatgaattcacccgggagaggaaggctgcctttttagggaccatgatgttcagggtaatttcgtatttgacacatgtaaatacttagtactctcaggtaaggtcaaattatttatcatcttaatttatatttcaataggcctacaatttagaggcgagaaatgcctccttatgaatcattatggtctattaggggaagtaatgtataaacagcactatttgggagggaatcacttatgttgacatttaaatagctcttcaatagttaaaaaaaagacatttgagtgtctttgattaaatatacaatttacaagaccatc

SEQ ID NO: 70690 - DNA, 1450 bp, Homo sapiens
ctgttagcctccaggcctcaaattagaaggaggaggggaactcatgcttgtccagcacttcagcaagatcatctcactgaatcctcataacaaccccatgagataccgtggtggttttaaacacgcccgctagttattcgacactcttcccaccaagaggtgtggtctctgtctctacttctagaagtctgggtgggcttgtgactgctttcaacacaacagaagtgacactctgagacttgtaagacaaaggcagaagaagccatgcagcttgctcctggctctttttggggcacttgctctgagagaagtcagtaagaagtctactgccatggcagagactcacaacataggtgccacagtcaacagcccagcagagctcccagccaatagccagcatcaactgattgctacaggagtgtgccatctcggatatccttccgatggctgcagcccctgttgatgtgtgactgcaaccgaatgagatatcccaagtgagaagtacccagctgagtccgttccagaattcctaacccacagaattgtgaacaaaatcaaagagttggggttttttttgtttgtttttgagacagtatcactctgtcacccaggctgaagtgcagtggtgggatctcagctcaccacagcctcgacctccagagctcaaggaatcctctcaccctaatttttgtatttttgtagagacagggtctccccatgttgcccaggctggtctccaactcctaggctcaattgacctacccgcttcggcctcccaaagtgctgggattacaggcatgagccaccaaacccggccaaagagttgttttaagtggcaaagttctggggtaatttgttgcatggcactagtcacaaaacagatccgtggtgttcccacttgaaactgaggtgcagaggggctgaataacttgcccatggtcacacacctggtaagtggcagaactgagactcaaacctggtctctcagaatccaaatcatagccccttctcacggtgcccccctaacattttctcacttccaagaagagaacattcttttcagactcgactagtttccaaacctggctgtgcgtcagagtcagcagtggcgtgttaaagatagagatttccaggccccaccccaggcctagtgagtcagtattttcaggcgtggggccaggactctgaattctgaactggcaccccaggtgaccctgaagcagttagtgcgtgaaccggacagtgaaacccactgctcagccaggttattacagaaaactggaggggaccagcaaggttttcttcaaaatatagcagtttcagaaaatccctcatgatctgagctcatctgcttcaatttcttttttttctttttttcttttttttttttttttgagatggagtctcgctctgtcgcccagactggagtgcagtggcatgatctcagctc

SEQ ID NO: 70691 - DNA, 868 bp, Homo sapiens
tttatgttctctaaggaggggcctgggtcttgttaaccgggggtttccccgagccaccccaacagccacaagcacagtgcaggacagacaagagaggcttgaacgaatgctagttgaatcactgactatgctgtgttcaccatccacgaaggaccatgtggtccaatatccttcctattcgtatgtgtgggtaactcttggagcatggatgccacacttatgacaagtgagcagtgattctcagcacagaatgtgatatttttctgttgcacaaagttaaacagtgaccgagtgtccacaattgcccaacatggcctgaagctgccagccaaggaattgggtcacccctggttcactctgaggggctgggggatccccgtcttgacccattggcaacccactcactcttgggaagctctgggtgaagggattttggaagccattccctggctctggaactagcaacccacaactagaagggggagggggtggtctgagagggctgccaaggggcagcagggcttcctggggcttgggcttgctctggggtgtgcccaggtttttggggggcgacggggcctgagcagtgggctgaagagggcacgctgccagctctggttggcccagggccagtaagtctgactgaacttgagccagccctgttggcccacagactctggaagctgaactgctccagcgctccttggcctctttgttttcacttccccacagctctctcttagtgtttaggaatgtgctttgaaggttccagcgtgtttcgcctctgcttagggaaaccaagagcagaggctgggcccaggccagatggcttgaggaagggcacctgtgatcacactgagagcgcccc

SEQ ID NO: 70692 - DNA, 2492 bp, Homo sapiens
aagtcactagagtatttgtctttcgctcactcgggccggggaatttagtcctgcaaggggacaggcggcggcggggatatgctcagaacccaggcgcttcgacagccctgagcgccccttgtgcgctcttcacccctccccaccccgtccctttgatatactaccggatctaggccattgttacggggaggggtatgtgggccgaaggaactcggggttggagacctggagcttcccagcgcgccctggccctggcgctgcggaggcctcgggtggagtgctggagggctcgccgctgcgcatctcctctgagctggcagccagcgggtgccccacgctgtcaagcggcggcgggtgagcttccagcagcacaggcacactgtaaacagccgcgtgcacgccctccccgcccgggctgggaacctcacccaaacaccacgccgctttctctccggctaccgggcgaggcttttgtggccaagcctaggggaagggggtccccaccccacccccaggccacccgggccccggagccagcgttctgaatctgcaggagtgcggggtgctgcggggaggggagggagtcagcgcctgccccctcctcactgaatgtctgctttgttccggaaaacaagggaagcattaggcggctgcccccggggaaacacaaaacttctttttgaatctcgggaaaggcggttgactgcattaaggagctcccgagacagaatgaggaagggaaaagccgagagggcgggaggagacagggagacttccgcgggaggccgatggtcaaagtggggggtgaaaccgctcagggtgaccgggctggagacccaggaacccgattcggcgcgaaggtgccgcgcgagttccagcgagcagcctgcccggccaagtggcgcctgcccagccgtcggccgtgccagcttcctgccctgcccaggaccgcggagcagtcggggacgccgccgcaggctggcccggaatcgcaggacagcggcggggggagggggtagccaggccgcaagtaaactcgcactagagctttctgcacacctccgccctagagagggggcccggacccccggtctgtgaggcgtcggctttggccttccaaccttggggtgcgcgaggaagcaaagacccagggggcacccccaccctcgcccaaggcccgagggtgggggacagctgaaatgtctttggtcttgtttgatgaccgcttggcggatctgctcccatccgggttctgccgttccgagagtgccgggtcagtgatacccaggccggtctgagcaggcatgtggatgagcaaaagcaaatctgtcgctcctccgaccgccacccctcacttaacctttcctgcatccaaggaaggggagggcacccagactctgccccaccccccgcggggcgctccctctgcctcggaagctgagactaagagcgagggttttccccctttcccctgggctcgctgggtttctaacttcctctaaacctccctcctcgctccgaaaagccccgaggagaggagctgagaggaagcacgccgctagtgtgcaaaatgaagaccatgtgtgaggacggcggcatcagagtgcagccgcgggggttagggggtggcaaaggcccccgcgcggccggaggctcggggccgcagcagccagtgcctctgctctgcgttggggactcggagccgcagcgagaggcagtggagaggcagggctggcctcgtggcgggaggcgaggagggggtgcgagggctgccgcgccgtggggggcagggggcggggacgcagccccggcttcctgggccgcagctgcgaccgagggcgcaagagcagatcgtgctctgcggcggtggcggctcgggcccgccgctctagcagctgagaatcaacaaagggaggcggcgggggaggggcgccaccgagcgttcgctggctgctctggaataataaaaaataattaataatgataataagagaaaaatcccccggctttcatggctctgggtttccgtgtggctgcagcgggaagcgcgctgtccttgaggcggcctctctcgcctggcctgcccgcccctccccctcctcgccccctcccctccccaggaaccgggaagagaaaggtctgcagctgacaaatattatccattctccccatcgatcgcggagtgtacagatgtgagcgcttgatgtgcccgcggagcggcggatcctccctgctcgctcgctctcgcccaggctccgctcgccgtccccctcctccccctttgttctcctcccctttccctctctttaaatagatttcagggcgctgcctgttggagagcagctggcgatctctcccgagagagggagcgagcgaagcccgaggtgccctgtcaccagcctcccctcccccacctcggcttttctctacgtcccccccaccccacctttctccagtttccaaaatagaaaacaccgggaacacccacgtcc

SEQ ID NO: 70693 - DNA, 1517 bp, Homo sapiens
gggcagtgcagggaggggacccagggccgcggcagaagagccaagggtccggatctttccctggcagcagcagggacgcagcgtgggtcacgctaacagggtacagtttacccattagggaaagtcggcggagacggccctgttattcctcttttgcagatggcagattaatccggcagcacccggcctcaaagggaccggctgctcggcaaagggttaacccgtcggccggtaatcgtggacacgcgcgcacacacacacacgcacgcgcgcgcgcgtcctctccgcctgcccgagcgcccgccgcggcccgcagtgcgcccggggctgggggagtagctgcgggaggggagggggtcgggggaggggcggggcgggcttaaccaggccgctcgactgagccggggccacctcgccgtctgtcacttaaatgattgtcctccgctccgctcagtgcggtcagtacgggctgttaacaggcagttgcaatcagtttccgaaaggtcagccaaggtcctccggctctcgcagacggaaggcattacgaaaccgcttttgtatctgcaggcactttagaaaaagaggcgagaaggggcgcaccgcagtgccgcggctgctgcgaccgggggagagggtcgggggctgcggagcagaggagtccgcacccccgcggccagggtcaggcggcgtggatatcacccgcggagtgacccagggcctccgggtttcggtggggaagcaggaagggggtggggagcaggcggcaagggaaggaggagtgggaggaagtgggagaggcgtcctggctcctctcctcacccagccaacagcccacacccggacccagacgggagcgggcggccttggacgcgaggagaccccactcggactctcaggccctcctggcgcctggaagtagggagggggtgtgggggggggaaagaccctcgccgagcgagcgagtcccagcgcggtgtctgaagacgctgctgccgccgccgctagaagtcgtccatcagcaaccagtccaacctgccagtgataatgtgcgatcaacaccaaatcacccccgccaggcgcgatccatcatcgcagcgcgccgcgggcccgcgtgaggctgactcgcggctggggtggggagggggggcgcgcggagcaggaggcggtcgcccagcacacccggactctccgcgcacctcgctgcccctcctggaggcctgcacccaggcgctcataactctccaagttccccagctacagagcgaaaacccagtggctccgagttctgggcacagctcacttaggaatccgcgcgtcctccgcgccctgctgtcgtggtcacaccctgcaaagccattccagcctcggagctgccctgcccatcccctccccctcctccgagaaaccgtggctggcaggaaattaatatttaatatcgtgaaattgattaaagggctggaagccggcgatgggttggggggaagggtagggactcctagcgtaattaaagatctgag

SEQ ID NO: 70694 - DNA, 1291 bp, Homo sapiens
attcatcaatgccatttctggtaaattggacctcaggttttggagtgtcctaggaggcaggcagcctacactgcgcgcataccgatgtcacagcaaatgtgaggaaccgcacatattctgtagcctttactgcctttactagagaataccgtggatttcacaaccagaagtagcagattttccaagacattcctgatttcaagtgctttgagccctgtgtttttacggggcatgaagccctacctgcggttactaatgtcgaattgcgcaccagaggtgtcccagggctggaagaaatggcttgggtgtggggctggcacccagtggtccccgctggtcccctgtccaccatgtctagccaggcggccatcctcctggccgtcccgatcccagccggggcccgtccaggtagggctccgggcagggggcctgtcaggacgaagtggcaggactggccctcggggtccccgtgggtaaaggaggagcggcttcgcgccctgggacagcgcgcgccccggctgacacggggctgtcgccgcttctcccccggacgcgggcggctgcgcaccggccgccatcttggcccggctgcgcaggcggcgctgcccccggcggtaggaccgcggagccgcaggctgggccggggctgccgcgcgggcgttcccgggctgccggggggcgctccctcccgaggcccccctccccgctgcgggccacgctgacccaggtcggggacgatggggcggccgtccctggtgaaagcgtggcctgtagtgtcgcccctcctcgaaacgctggagcggattttaatcctgagaaacgacctctggttcccggactcccgcgatggtcaacgtgttatcgcttctcccgcgcaccccagaactctgtccccagaggcaacctgccgaggcagctgggggtggggggcgaggcctacccaccgttcacagggcgctgttgaggccagagaggatttgagagttaccacggtttagggctcctgattggagaacactggaactttatttgtccactttttgaatttaacatgcatttatggagcgcttgctaagggcgaggcgctgtgttaggacctagggggatccaaaagtacagaagtgaatttttaaaagacacctttggccccctcaagtaatttacaatctagttggaaaggcagacttgtaaatgactgaacacaaataaaaggcaccgtgaggtgaacgtaaataaagggcatgaatcttgcagtaaatggcctgggtaaaggccaattattttaaaaata

SEQ ID NO: 70695 - DNA, 4442 bp, Homo sapiens
ctcggagtcctcatctgtaaaataagaccaatactattatctacctcgtagggttgttctgaggataacatgcctccatacataaggtgcttagaacgctgcctccagtacaatgctacgtgtgtttgttactatgatctggcactccctttggatgggtagggagtacaaagttccgggttaaagttcctggaagtttacatggagccagtggtcttggcagggtggaaagggcactattgtatggccactgaaaagtgaaggccaaatgccctcaaactgtctaggtctccactagaccgtcccataaaggcttgtgtgtgtgtggtggtggataggagggagagtcctttttaatggtgctcatttagactggattaatagcaagttccgtcagggctcaggcaccattacccactctctccctgcagccctggggaagagcgctggtttccaggacctccagcctactcttccaggacaccttttttgatggctgaaggccacctctttaaatcagttctcggaggagttggccaaaagccatgtcctctgggatgtactttggtctaacactggtgcagggctggcgtatggcaggccttgtccctgggccgctggcgggccacattttactggtgcacagatgcaaataccacttctgtagacagaatcggtcagacttctaatttcaaaaggcttcccattacctttgaaatggcgactctggcaaaaaggggaggagttgcggcaaataagagcctagggaggcctcggcctcccctgcttggcctctccagggtcacccataattcattaggtgaggctgccttttccttttcaaacacaacgcaaatggcctttgccttaagtggctaccggcgtttgcctaatcactgaaatgtgctggcagtgcgctctagctctcagtagatccttatcggaactgtgcgtgccaagctgccagccccgagaaagacaaagaacacgggcgcctccaggtttgcttctgaggcctcagggtcacctctggggcttccccttcacagcctccggcccctacaagacgctcccagccagcctccggaacaaacccgcagccctaaatcagaattccagttctcgagcgccacccggagagttcacatttcccctcctccgaggccgcgtggtgcgcaagaaagagcccgagggcggcggcagcacacgtctgggcagccccctccccgtacccagcagcgtgtacgcaggaaaagaaaaagccaagagaaaaacgtggactgtaaaagccaaaacgcagaaccatctactactaactaccgacaaccccaggcgggagtttgcaaggagtaagcaaccctctaatagaaactacaactaaaataattcctctcttcgcgttctattaaggtcctggaaggtggaacgcaaaggggaccctgtcttcttaggacacagactggctgcgccgatagtgctcagccccgcacctcctgagcatacatttaatgttaggcaaagagcaagtttcctatctaccgtttgaccacagtttctcacagtatttctaattgattcaacgtgtattagattgaaacaaaaatgatcttggttggaatatacacgggcaacctgtatttagatggggtaagttcctgcagctatctgaccacatttgtctggtccctctgagaatccacgttttctagcccgagaaggggcaggcggccctcatggcgcctccttcggcggtttcctggcgaagcgcccatcctccccaagcaccaggaacggaggccgtccatattaatactcgcgggcagcctgttctgacctatactgtcattttttccatcggtcgggatcgggctgggggtggggtggggcgggggctctcctccgaggggctcagcacggatcgttgggttttccccggcgaacttaacacggaggcaaaaggggcagatggaaaccaggccccggctggccccgcgcgcgtaagcgcggcactcagcagctcgacgcaaagccagggctggattttcgcggcccgggcccggcggccgcccagcgcccgcgcgatcctctctccttcgggttgagcaaacgtggtcgcctaattccgcccgggagacagcagctgtgcggcgagagggggagaaaaaatatcgcaacttttccaacagaaagtgtgtgcgcacacgagaggtgaaggcccaccccgattctgtgcacgtatcgacacagcatctaatcagtgtcactgccaggaatacgcttccgcggcgggcgacaccgccgccctcgccaacctgcaggagggaggggggatgcaaatggcgtctcgcgtcgtcctagactccgcgcagcacccgctaccgcgactccaagcagacgttgcagcaaactggggtgcagcgtctggggacgcgaacgcgcaggcggcccgagcggtcgcagggaagaggaactagcaccactccccgctacgagaccgttccccgcccccacctccggaagagccgcccttactcgactggggtgaggggcgggaaactttgcaagaagactgttccgcgccttccccgcgtggcacctcagaagaacgtgggtgggtttcccgtccgaggccagaccacgctaccctacttttccaggtttcggacctgaacctcgtggactacgggagggagagtacatttcgggccactgcggggggcggagggacaccaaagacaggcgtcttcaagggttctggcagatggccaagtttgtgtcctttccctcccacgctagagtagcgcacgccactttggggaagcgtgagaccgttcaccaccggccacgaggccaccaatgtcttccaggtggggccgatggtttgtctgcagcactcccttccgccttgcggtcctcgcctggctcccacagtcctggggagcccccagagctagcccgcgtcttccctcgcccgctcttccgggggaaagggaggctgtttgtgtggtgtgtagccccgctccggcttgcacccccgcgagccacctcgcagccctccccggcctcggcctcacggatcccctcccggagtagccccgcgggcccccccgccatgcgtaatggggcgcccctgggacgcaggcggggatggcggttccggtcgttccgggatttgcgtgcaagaagaaaacaaggccggcgactacaagagcggcgactccattcttggggttcagacgccctcgcagcctccgcgtcggttccgctctcgccccgggagcccgcttccgtgtccctgcccccgccccccaacgattcctcgtccggcccgtgccgcaccacgcggagctccgcgcgccctggctcccacaccggtccctccataactcgcgctcctccctcgctccgggctcggggagccgctcgctcccagcgcccagagtcagccggttccaccttcggctgcgagagccgccgccccgcgccacccccgcccggcccggcccttgtcccagcccggctcccccgccagctgcgccgccaccgccgcacgtgacccgcccccgtcgcggcttccgctgagctgcctgttccggggcacaaacaatttttgctctgacgcggggtctctcgggggccctggcgtcctctactccctgctccccaccccaccccaccccctaccttccgggtaggagaactcaaaacaactcgctgaccttcgggccgaccagctccgtcttccactgactccagcattccgttcaaacccagcagccacggcttctaagatttcactccgctctgggctgggggggagggggcgagttctccgggagggggtgtctcagatcgaaagagccacttcacgctctttctcctcctccgaggtgagtttttagactatttggaggccttggggaaacgcgagcagccgcgtgcaaaggagcccccccgccttctccccgcacatgcagccttgtctagtgtgacccgatttccagggtcagcagcagagggcctggccagcttcggaaataccaccaagcggtggactgtggcaccaggcagagctggggtggaggactgtgctaaataataatggtagctcctactcacgtggtctgtgctaagttcttcacaagccttccaactttacagagtgagaaactgaggcatagggaaaggtcagtcgtgtaaaactgggtaaagctcagttactcagctaagtaagtgacttagtgaggatttgaacccaggtctctgagttcagggtggttaaacatgctgtaagtatgttacagtgcataccttggtatccacagtacaaacctgtctacaaaacccagtgtttgcttgagagctgtatatttggcgtgtaacattgtggctggcatatagtaggcactcaataaatatttgtggaatgaatgggtgtcaga

SEQ ID NO: 70696 - DNA, 806 bp, Homo sapiens
aacttcctgctagtcagcaaggccacctgcactacccagttcctggggcatccttaaaatggtgtcatcagcaataccaaccctagtgagctgatttcccacagagcagaggcagggactgaggccatgcagccaggctcctgctggcttaaggctttaaggaatctgccactcatcagagcatagccccaccccttgctgaaggaggctatgaggttccctacagggcccacggtccctacagaccgctgacatcatcctcacctgagaagggagaagggatgggattactgccctctctgctgccctggggctctgggcccgatgacgtggggcatcctggcggaggctggcttgtgttcacagccgcctgccgggagctggagcctgtcagctcgagcggcagcgagggaagacgtttctgacacaaaaccccaggggaatgcatggaggagctggctgtcattacttattaacaatgggcctgatccccagccaggcaggcccagggaaatagcctgtggggaggccggcctacccccagcgaggtggattaacactttcagggcaggagggagccgtctgagggggtcaattgtcacatttttgcatgtaagcgggcggggggggcgggcagaggggggctctctttatgttttcgaggcaggaacactcttttccttatcttcccctcccctctgtgtccacatttttctgttctcctgccttggcaggttttgagcaggcacactcacaggatgtaggagactgctcagaggggacagacagtaagattccacaatgca

SEQ ID NO: 70697 - DNA, 552 bp, Homo sapiens
cccacagtccacaatgggagctggctcaataactttgttgactgccttcccatccctggcccaagggccgtggtgggccaggaggctctgcttctgctgatgggagcgaagggttaactgggccctcatcctccagcaggccagcctgaatttgtttgcatggtggccaaagattccaagagcagcaagtggacaaacatctatcactgtgtgagctctttggaaccctctgcttacctcacatttgcagctggccaaagcaagtcaatgactaggtccaaggtcagcgcgggagggcatgaccaaagactggggaagaattggagccaattttgcaaccttcacaggcagtgtgggctggcatcactcagcctagcgaggaagagctactgacactcttcctggggggaaatgcaggctgtgagccacgactctaaccaggctgtgggcttatgcaggaggggcctgtgctagactcatatcccctgccccagatcaagcattgggtgggcttgtcaaagaggcttgcggagggtctggatggatattgaa

SEQ ID NO: 70698 - DNA, 1191 bp, Homo sapiens
ccgtcgctcgagactggcagaaagatctgcactcgggaggcaccctcaccccgtgggctccgggacccctcgactagctccatcacccattccgactacccgccctacgctccacctcttgacccgtcatcaccgaccggggggcgggactgcccgacttttcaatcgctgcctaccattggtagaactctccatccgttactttaagtcccgcctatcaggctgtcgcttcccaggttacgtcccttccgtaggccgcggcgtaactggtgattggtggagaaagcggcagctgtcccagcggaagcgacgaagggacgggacccgggagcctggacgagtccgagcgcgtcacctcctcacgctgcggctgtcgcccgtgtcccgccggcccgttccgtgtcgccccgcagtgctgcggccgccgcggcaccatggctgtgtttgtcgtgctcctggcgttggtggcgggtgaggagccgggggccggcaggacgtgcctggggaggtcctgcgccgcggggcttgggggtcgggggcggccgcgggcgagtagctgcgaggcaggtgccgcagtgcggtccgtcagcggcggcctcgcctcagccgcgtccccgtcagcatcttctctggatcggccgtggcggcgcggcctcacgggccgccggggccggggctgggctgcgtagggggcccctgagcctgcctccaccctccactttgagggcggcgcgtccggccggcttcttgcgcctgaaaaggcccttcagagtacggagatgcatttctcagtgaactgggattgagtcgcagcccgctgcgaagaagagaaggcagactttttagctgccactggctgccacgatgtttttgcatttgtatggtgccttcatttctagtggttgtcatcagtaattgctgaaatccctgcccctcccttcccttatgtatatttccggatgcaaaagttgagatggagtcattatttttatatgacttatatttcttaaggcgaatacaaagcacctctcaatagtttgtcagagttccaaattttaaggatttggaaacaggatgtgagtcgcatttttagggtcacatgtcaataaatggtagctttctgagtagaacctagattcctaagcattcagcaagaggtgaagaaatcagctaatacgtggcctcttactg

SEQ ID NO: 70699 - DNA, 692 bp, Homo sapiens
tgaagcatgagcaagggcggaggaacgggagcagggatttgccagggaaaagtagtagtctccagaaactgaagcctagagagagatgtggccagaccgctggggctcatgatcaagaatgaaagtgaaaccagtcagttcccttgtgagattctttcccactaatcagaagcagaaaatgtcatcaggactggagttgggccaggcaagttcagagaaaggagaaaaaaaaagctgagataacagcaagggacggattataatgatgggccatggaatctgggctagctgaggtgacaaaggcaggcaggaggacagagggtgctgggtattcaggaagcagtggaagcctcaaagaggcggaagtagtatggggcacagggttgggggcaggggtgcatgaataagtgtgccaaaggccagcaggatgttagacactgagactttctgtgccaaggtccagggtgtgggcatgcaagccggaggctgagggggagtgaagcagaggatgctggaatcaggagcccagaaactgagaggatggggttggactagaaggtctgtaggtgacagcaaccaagaggagcaaagagtggtataaggaggtagtacaggctacaagaggattccaatggtgtgaaagcagcaacgcagaccaaacagatgagggacaggcattgtaaagggcagag

SEQ ID NO: 70700 - DNA, 1545 bp, Homo sapiens
cctttccagtgcccaccctgtgcctgctgataactactggcatgtagactgactgctaaagtcaatttgtgttaggaagccacttctggctgtccctctccgtcccttactgggcaaaaaaatttcctactcgatctacttagtaagtgacattgccaagatctgaagacagatccggctgcctaccccattcccagctacccaaagtgcctttaactgggcacttaaggtgctattttagccctaacttcccttggcttactctgtcatccttacggcatcctatagccaaaaaagagctgatgagctgttcagcgagccttaccctcaaacaggccacacaagagtctccctccctccctgcctgtgctcatgatgctcgctctgcatcttgccccagtatctcttgtagaactctttcctgtaactttccaagcaggggtaacaaactcaaatgccctcaggaagcagacgggtagaagaaagcttctacttcactaagctgggttgggtcccgcataccacccctgaaccgcctagacccttgatcaatctctctctctgcatctgtttatgaggccccggcgaccacaagaccagatagccaccccgagtgctgggtgacccgccgcttcctccttccgtccccgcctcaggcgcttaccttggccacctcccaggcgtccacgggccagcggcccggccggcagtttccccagtgcacatctccatttctgttgacatgatgtctcaaaatctcccttttccattcagcgcacacctgacactgaggctgaaactacagggggcggcggtgaggaggggcccaggagggagggacgtcgcggtgggccccgcatcgcggagggaacaggacacttgcgctctgggtctgggacaggaacggggatgaggaggggtggggtgggggcggtggtcaaggccccgagccaggtgctcacctggcgggcgcgagggctgcaccgtgagccgccgcggcagacggcgcggggccccaggccgggggctgcggcgagtaggccgcggtggaaggagagcacctcgcggccgacgaaaccctgcaggcagctgcgcagcagtaacaggcagtggcccgccttcacccagttcttgtactcggcgcagttgaggcgcgccgctagctccgacagcaccatgtctcccacttggaaccaggaggttgcggggcgtggcggacggcagtgcgcaggcgcggagcctgggaagtacccgaggcagcggcgcctgcgccggcggcagcgacgcctgcgcctgcgcggcgcggtgccaccgatcccggggcggggcatcttgacttccggggcacgtcggctccaccccacttgggtgacgtctgacgtctgacgtctaacaactttggtgcttggggaagcagttaactatttgaaacccttaggccctcttcgtcccccaaacagagaccctgtcagcatccgattcgactccctctcctaatgtagggcacttctgttttaacttttttttattgtccagatgtacaag

SEQ ID NO: 70701 - DNA, 723 bp, Homo sapiens
atgacaaacttggatacattaaaaaatatccaagcaaagctaaagaaattatgttgagtactaaaaataaaaggtctgtccatatctagttttatcctatactcactattattacttttcccctaatactcatcagtacttttatctcatcctaaaatcccaaaagctttactaatgtcaatcaacgtgttagctagatctctcaacttcatagcagctataaaactgataatcatatcttttatggtttactttaaaacactgaaaaaaatattcaacaagccaggaccgatgaccagacccagcaggacaccaacctccctccaagtagactctgacctattaatcttagtacagctgttcaatgacctgcagatccagtccacatctctgcatcttgccaataccaccaccatgacgcaatgcaccaaagtaaaagttcttgctgaagtacaatcctgactgaaggctagaggctagctcctactgagagcacacatagcccacaagcaccctaaaaggctctcttaaaaatcggccagcaatatgattagtggtactataaagagaagaatcaagggcataattatgactctttgccagtgtctacgaaggatcataagacaagactgagacatagcagaaatgttaaacacacattaagatccagcagatctcagggctgggaacctcagtacctttcactctaactcagcaatggct

SEQ ID NO: 70702 - DNA, 1999 bp, Homo sapiens
acaaatttcccatctatagagttttttctaaaagctcgaatattatgtattccagccaagaaatcaagagagttctgttgggaactcggacaaaaatttcacacaattttcagtggaagtgtaacaacacgcaaaattaacaagtctctgttgcatcgttgccaggaagaccccagatacaaagcttcttctccacctctgctgaaccccaggagttcaaaaattctagactaagcagtccagcggagaacacagcagcctctcggggagagggaggtgcaaacgtctcagccggttgggcgggaaggggggctggggaacaggcaggggtttcggggcacttacaggtccgtcaacaccataagctccgagtaggcccggtgcagcagaaattcaatgagggtgctcagccggtagcccgggctagccgcagctgcagcggccgccgccacggcggctcccgggggaggaggggctggggctgacgggggtccgccgctgcccccgccgccgcctccgggcgggaccagctggtggttctccagctgcactggggccatggcggcgcaggaccgggcttggcgcaacggcacacgatgcggtcctcgagcctcccgggcgctcggtcaccgcgccgaaacgggagcgggcagagtcgccaccgcctaccgccgggccgcctcagaacaggaagccgtgcgccgaccgcggaagcccgcccccatgtagcgagaagtccgccgaccccagggacaggagcgaggggcggggggaggcggggatgggggggaagcagggcggccccgcagaggggaagctgcgcctccgcaaacgctcagaagcagcttcgccagacagccgcaacgtacatgttgactgcccgaggcggaagtcgatcggcagagcggaagggggacctgcagaggaccttccgacaggtctgtgtctgttctctcagctgtctagcaccgcagcgctggggggcgcgtgggagtgaggcggtacctgtgagcgcgcgggagagcggaaaagggagccgcgcgccgccggaaaccagggtgagggctgagccggagtcgtcaccgggaacgtcagcagttgccccgcccttaccctcgccgctctccctcccgcctccgccccctggcgttgtaaaggcgacaatttgcccagagaaatccaccatcgcttcctaagtggggcacaaacacagccaggggaggcctcctctaaatgttcgtgaattctggttctggaatcgcgaagaaatgggagcggccgcgcgcttgtgattctcaggcctttgctcctcccatacacgtccacggcgcgttacgtgggagaacgttttcgcccctttttttttttttccaaactgtgggaaaaggtgctagaaaatatgattgcgggtagagacagggccgctggcagagtaactcaattttaatagagtcgggtgtatgctgaggtcgtcaccatcccccaaatcctgtcagtcccacacaaaaacggcccttaaatcccctgccacgggctctcatatagtttttgtccttgctcttgcagtcaccgctctattctgaagggcttttcagttcatccatgcctaccgacactcccgtcccccccatcaaagtccacgtttaattttttgtacctgctttaaaacagcgattctcaaccttggctgcactttgcaattatctgaggagctgttttttaaaaaaatacttagatatatgggttccacccctgtagattcagatttaattggtctggcttgaggtctgggcttggggaatttttgaactttcctaaggtgattctaacatgccctaacgtagagattcactattagaagcattcgttgctgcgacccctttcaaacatctttttgcagtttcatctcctcttggtgtaagagatgttcatgatgttccctaaggttagaatattcttactgtcatcacttgggtaattctttatcattgttgaaagc

SEQ ID NO: 70703 - DNA, 1124 bp, Homo sapiens
ctaccttatatctctaaaggccagaactcacaacttctgcctaggctggggtttctactttaccctgagatgtcaagatcagtcaggaagtatgttaaaaatactgaaatatgtgaatgatttccttcgtaagtatgagttagagtaaatccagttactctgtgaacagtgccattctgtctcactgagacaaggtgtgaacttatagctcgctaggaattggtcccacctgtgtcacccatcttctatgtttcagtggagaaattcctaggcaggttttttttttttttcttaaaaggtctgcattcagtcactcaacaagtattcattgtttattaagtgccaggcatgatgctaggtagtgggtatcacattataagtattaaaatttttatatgagtagttggtaactatgatacattaatttagaaactttagtgggatgtatatacttaattatgttctttaaatgtactaaaaaggaaatcgtgactgttaggcaaatactgtaaaatggctcacttaactcctattctaatgttggtggtatttcaggtgaaactttcccgtggggtgatggtgtatttttactaactacattttcctggctgcattatttctggctgagtcatatccaatctctttctgcttaaactagctagaatgaacctgttgtccataactatgaactttgagtaagagaactgtaaacaccagctgaggaaaaggttgcaaaagatacacacactggtctggggaacaggaatatggatgaacctataggagaggatacagagcgtggggacttttgtgtttcatattaatgaccaccagagagcatccacataggtgcacagcatgatccatcttgtgtatgtcagccaacctctttcctcggccaccctggttcctgtgaacagagtagtcatggtggcagtgatggaagctgtatatgggcccaacaacatgtactccctttcatcatggctgatctaactactgtctctgctaaatgcccaaccttccagcagtagacaccaaagctgagccctcaaaatggaccattgctctgggagatcagccagccaacagcatatgttgtcaaacttttgaatttttgccag

SEQ ID NO: 70704 - DNA, 1632 bp, Homo sapiens
cacctcagcccaagccaccagtatctctcacttaaaatatcctcccaattggcccctttccagtttgttcgccacacagaggtcaaagatatctttgtgaaaattcagttttgattatgtcccatccctcagttgaagcttctcaatggcttcccattgcttttaggataaagaccagaatatttaacataggcttcaaggttctaagtgatatggcccctgctcccctgcttcatctccccatctctactttggccacatggcctctttctgcccttcaaatttgctatgctccatcttaccactcactgttacctctcccctaaagctctctcccccttctttgctgtgttaatgcctgctcctgcttcacatgtcagcctaagccttacctctttgaggtaacccttcctgacctccctaaatctgcctcatagcattatgtattttacatttgtttgtgtgattgcttttaatattggtcaccccctactcctatccactataatgtaatcttcaagagggcagaggcatgtttggttttgatcatcgctgtatttgcagtgcccagccaagagtctggcacactgtaggcacttggcccctatttgttaaactaataacttgataaatcaggggttgggctagaacatctctagggttcatgttagcgctaactttcagggcttccttttcagatccttcttgtagatcagaggggtgatggggaaagcagccaactgtggtaaattaacagcttccacacagtcaaagctgttggttagaactcaaaggagcccttttcctacttcaaagatactgcatggcaggcaccagcattgaccggccagatagttttcaaggaatgcttgatacaggccagcaaactaagtgccagaaatcctgggacagagacttttgccaagagattccctgctctggtgagctgagctgagctgagagatggctctaaatgtcactgattaatcatgaagggtgcttctcagccattccaacactctgcttttgctccttttcaggtcttcacccttcggccccttctagaaaaaccccaagtgactgctgtctagaaatatcctcagataattggcttggctgatgcccagatgtcccttgtcttatattaaggtgttggggaaggaggcagggacaagttactcttctagctcttgcattgtatgattctgttattctaaattttgagaatttttttcccttttaaagagtgaattaattctattttgacagcatgacttggatcccatccagggaaaagaggtaggaagttccagggatgtgagtcatctatccaccggggctggaggcagttcttctgttcttatcccatgacaaggacaaactctctgtcaaggtcagatcatgttctgaatccatactcaccaggcagcctgccatttccaatggcagcttctcctggggctcaggaaggagggcttaggtgaggcacctggacaatttggtccttagaaaagggtgttcctctgactgtgagttaagaatctaatatcctgtgtgaggtgggaaaaagaagtgagtgcatggctgggtcctgagtttgggtggtagaaaaggtctgtttataagatggaa

SEQ ID NO: 70705 - DNA, 933 bp, Homo sapiens
agagtgctgagattacaggcgtgagccaccgcgcccggccctggtgtatcctactttttaaagcactctggaatggagcccgatacaggacttccttatatccaaaacagccatatattgactcttgtggatattgtttctactttgccgaaatttatttatatgtgggctttgatttctttatgaaaatttttctcatagactttagaaaagaaacttgtaatgcttccatgtatacttgtcggttggattcccaactatttgtcaactgagcgggtaagcccagaatgaagacgggggaaaataaaaatagggaaccaactaactcaaaaggagagaaatgaataaatgtcaggacaacttgtccattcaactgtattgtgcaaggtttctgcagctgtctcctcagctgccaaagtctgggttaaagttcaaagggaaaactctccatccacatattttccaatttaaaaaaaagttaaagtatttgaaactcaaatatttttatacatgaaaatccaggggtgaattttaataaagcctgtgggcagaacagaagtaatccggctctgatttaaacatcattaatgtttaaactgtattaattttaaaacctcagccctggcacacttcgaaagccggtcttcctcctgctaactctggcaacaatctctgggctaaacgtgagtcataacttgtgacactgcagacagcatctgtgaggtggggtgtttcacttctcacttcggctcatgtttccttgtgctgattgggaagtaaggacataagaggaaagcaaattgtgggaatgaggttctcctaatttcattcaaaaggctctaggctaggaaatatttaaagatttttaaaaaaagaacaggtttttaaaagtgaaacagagcttcaataagtattaaaatgcagtagatactt

SEQ ID NO: 70706 - DNA, 1398 bp, Homo sapiens
tttagcagtttacaggggggtttcacttccgttttctcatttggaccatgcaaaagccaactgagtacaattctgcccattttacagatgaacaaaccagaggcacagaggagagggatttgcccgaggctacacaatacctgtgagtcacagccaggactaaggatcctgtgagcttctcagcacatgccactccttcctacaacaccctgccaggtccaccacctccgtaagtggagaatcttaacgaagggcgacctatgcacgcacctgacttctgagctgaggaacagtagaatgaaggagttatttttaaatggcttttaccgagcctgtgatgtcatttcattgatcacgctgggagatgcggtgctgagttgtgctatggcaactcgattaaggctgggaactccatttcctagaagcccctccctgctgtgtttccgggttagagttggccaaaagagaaccttgtgcaagaattgtagggcggaaggcgagcagcagtcactgcccctggcaggtttcccgtcagatacagtgaaggacagaaacagaggggccctgagaggccctgcagctcccggtttatccggctctctcctctgctccctcccagctaacatttcctgctgttggctctgctacccaacagctgcctcgggcccaccaccaggggcttggctgtcgccccacatggggcgggagctacgtagaggccacagctcccataaacctctccacgaactccccctccgcggccctgcttcggtggctagatgtgctttggcttctggaattttcctgcaagctctgatttgtccaactgcaccagtgcttccggcaacggctagtgactctctgatcttctgactcctccttccagacattcacttccccagctcttcccacagctgtgaacggttttattcctagaatactcacagtggctctgtttccctggctgaatcctgttacgatacttacagattctgctttacatgaaaaacagcataagaaaaaaaaaatgttctggagtgtaaggcagaattccacctgatacttagaatctatatatctcatgtgcttgatttatagattggatatgtgggaactaaggaaagaagattattcaatgaaccagtggaggaagaatcgtgtatgctttcagtgtagaccaaactggggaaatagatgagaaaggaataactgaaaagacataaccttctttatcttgtttttctaagctcaaaagatggaagaggggaaggaattggtagtgaagccatttttgtagtctggaaattttctgtcaagttttacataattccttagggcataccaaagaaaataatcagtcctgtctaccctctaagtaactatcttctcttgaaagag

SEQ ID NO: 70707 - DNA, 841 bp, Homo sapiens
caggctggtcttgaactcctgacctcaaatgatccacccaactcagcctcccaaagtgctgggattacaggtgtgagccaccacgcccagcccctatatgactcttgtagtcatttttcacccactaaggctcagtcaactcatagtagtaataaaacccttgtactcatacagtgctttactgtgaaaaagtattctagacagtatttcatttcattgtttcctaaagtcctggtgaggagacatgccctaaaggcccaagcctttgagaaagaaggaacccataaagaaggaggtcattctggaagctcccagctgtgccagtgaaggtcagtgcagtaccctgaggccgttatcactcgtaggtccaaagtcaatgagacagagtggtaattggaacccaaaaggggaaagtcccataaagaagctaccttgaaaagagctatgaccttttgtctaggaacacagccacactgaagtgacctcgcagggaaaaaaccaggaacgtagatccctggcttcactctaccctgttgctttacagacagggtctcactctgtcagccaggctggagtgcagtggtgcaatctcagctcaccgtagcctcaaactcctgggctcaagcgatcctcccacctcagcctcccaagtagctaggactacgggtgcatgccaccacatttggctaatttttttttttttttttttgcttttggtatagatgaggtcttactatgttacccaggctggtctcaaactcccggcctcaagagatcctcctgccttggcctcccacattcttcctttgatttcttgctggagctcccccttagccaaaca

SEQ ID NO: 70708 - DNA, 1615 bp, Homo sapiens
aaggtcaagagatcaagaccatcctggccaacatggtgaaaccccgtctctactaaaaatataaaaattagctgggcacggtgatgcacacctgtagtcccagctactcgggaggctgacaggagaatcgcttgaggttgcagtgagccgagatctgccactgcactccagcctggcgacagagcaaaacattgtcacagaaataaaaataaataaataaataacaatcacatcatttctcggccttttggctaagatcaagtataaaaataacaatcactgcgctcagtggcacatgcctgtaatcccagcactttgggaggctgaggtgggaggattgcttgagcccaggagttcgaggctgcagtgagctatgatcgtgcactctggcctggatgacagagcaagcccctgtttctattaaataaataaatagatttattttattatgtataacatatcttatgaaagataactatattccccaaaacaaacaaaaaaaaggaatgagaaagatggcactgtccttgttgttttgggtgaagtacatgaaaaacattcagcttcacacaatatgtagttagaaaagggaggaacattttaatagcctctacagataattatggatattcttttttgaaagtggttgcgtcataaaggttaattgcaatgtggaatctgaaaccacatcaatgtcctctttatactctgtttcattaaaatctattttgtactttggatctcttactcatccttgattgtgtaacatcatgcattagtcatttcaaaaatattggttcactgaattttacaggtattgcaaatgttgacacatttcattacacaatatccaaaatgtcccattcattaatgtcaccaccaatctcatcagaaaagtcttaaagtattgagaagacattaagcttacagtggcacatacaagtttcccaaaattcccattttcatttgaaagctcgaattttatgattggcaacaaatactgtcaaattgtttcccttgaagtgacaaggctcacttcttaattttcagtaaaatgtctgccaaataccactgtgtgaatatccataatttgctgtcagtggttctttcaagtaaaaatggtgttccacaaaaaaagtggctagttcagctctcaactcaaacaattgcccatctgcttttcctcaagatagccaccatccctcagagtgcagccaaagtgcttattattattattttaactgagacaggggtctcactatgttgcccagtctggattagaactcctggactcaatcgattctcccacctcagtatcccaaatagctgggattaccggtgtgcaccaccgtatccagctggagtattttatgtagatttcccatttcaccatatagaatatttaaaaaacatgtactcaagggttgaaatttaataaaattaataattttgactccttcaacaaggccattgttaagtgaaactagcaatttcttttactgtgaatgtggcaataaagaatacagtgactactagtttagtccgtaccactgccttggttcatactgaggtaccagcagttttagccactcttggttttgcaccatccctggtc

SEQ ID NO: 70709 - DNA, 1441 bp, Homo sapiens
attctatttgatcctcaaattctgattctttcttctgtctatattctgctgctgagcatatgccttgagtattttatttcagttattgcaatttttagttcaaaaatttccctttggttctcccttatatctttgatttctttgctgagactttctactttttttgttgtttcaagcatgtttgtagttgctcgccaaagcatttttagaatggctgctttaaaatcttgtcaaataattctagcaactctgtcatctaggttaattgtcttttctcattcaagttgacatcttcctggttctcagtataacaagtgatttttttttttttgaaaccagaacattttgggcatgatgttgtaagattccaaatattatttaaatcccgtgtttgagcagacctctcctgccttactattggcagatgaaggtgaaagtccaggttctcccctcatggggagtgagtgtgggaggagtgttccttgttattggcaggcaagggtcggggttcaggctccccagtaggcttcctttgataccaccctggttaggagggttgaaggtgtttcattattgcctcccttgacgccatcgtatcagggtgacctcattaccatggaacagtggtgaaagttcaaactctccactcttctgacaccaccccagagaggagggggaggagtactttgttactgcctggtggaggtggacatccaggctgcccatgtggtttccattgacacagggaacgaggaggctccttactctccagcagggatgttccgctgccttcctactcagccttctctgaccccactgggtgtggggaaggggtggtgtgaggcacgtccttacagtctggtaagggtgaaagtctaggctccccatttggcttttgtcccacagggtggagccacaactttttttctgtcgtgtttgcttgcagcaaagtgattattgtctagaagttttctgtcttgctaggctgtccttttcctggtcctttggctagaaagagcagacttttcttggaggttttatgttttgcgtttttgtctgtggctattgatgtttctaggttgctggcttcaccagcacccagtcaggaagatgtcagacaaaaagaaaattctgggaattcgcagccatgttgttccttgggtcccaaggcccctaaatgactgtgcctttttctctctgcctttcagtcttcatatgcttattttacatagaaaatctagggtgttggcgggcgcgatggctcaagcctgtaatcccagcactttgggaggccaaggcaggcagatcacttgaggccaggaattcgagaccagcccggccaacatggtgaaaccctgtctctactaaaaatgtaaaaaatagctaggtgtggtggcacatgcctgtaatcccagctacttgggaggctgaggcaggagaa

SEQ ID NO: 70710 - DNA, 4059 bp, Homo sapiens
atgattcatggaaataattataaaaacaaggtaacatatgctaagagttattagggctatgaatgatacatcttggataccctattagataatttgtggtgaaaaatttgtaaacaatcttgtgctaaatagagaaatggtttaaaaatttaagataccaataacttgctttcactgtcacctacattagtttggttccatttttaacagtcttttattacaaactgatataatcatagcataactaaattcaaccctcttctctataaaatagatctcggtttgtagggttttactatgattttgcatgccatttgatgtccacaggtattttttaagtcaaaaggaaatctgtaaattaggaactgttaatttcctcttcatttgggcatcctaggtagactgtacagatttgttccaagcaccccattaatttgagattagcctaagtttttcctatgcccgcactttggaatataaacatgtagaaaatagtccatgacacagcggatgggttcataagtttcttccgggtcctaacaccgaattgtgctgatgatctggcaatggaggctaatcttgccacatcaagtacggcctattcgctaagccgtctggggcactttataatttttttctttgctggtctgtttgaagggctcctatggccaaaaaggtggtcagtcccgtcagctaggctgtgaggacgcctaaacgctttgaggacgcctaaacgctttgaggtagtgatgatgcatgatcgtgtgaaagagtttctcagagcacctccctcgcggggtggggaaaaggacctcactccccacgccccctccttccgctgcgggagatagccacaccttccccctatcggcgccaagcaggtggccaggccctcgggacctcgcgcccccgcagccagtggcccggccagctcgtgcgtcacgtgacgcgggtcagctgcaccgccgggacctccaggcaccgcggcggcgaccgcccagcgcgtggtctcgagatctcatctttccgcgcccctccccccacggtcccggaaaagggggaggccggtgacgtcatcatccgggttcttgtcggcggggctacggttcacaatggaacaaaaacaagcggcccgagtcaaactatgagcgacgcggctgcggctcacgcgattaaccctgtcgtggccacacaccccgccagtccctgccgcccagcccctcccgagtggtgtgccagatcttttcgggcctcccttccccaacttcggtcctagagccacctctgccctcgtcccgctcctgagccgaggggcatggaacaggatttctggccgtagcacgaccctgaaggggccagccggaagaaacagtactgcgcgaacaatctttaccgcattgtcttcccctcccccaccctagctctccgggttcccggcggctcgcgccgaagcccggccccctcagcggctcgcgctgctctcccagccttgacggcccggggtggagggagagaagagggggcagctgagcgggagggggctgggcaggagcagggggagggccgaaaggaggggcctgaaaggggcgggccctgacgggggcggagaacttcgggtcttgggcggctctggggctagtgggagtctgcgccgccgccgccgccgccaccgctgctgccgccgtcgccgctaccgccgccgccactggccgagcggtttttttttttttggtttgccggatccgccatattgacgaggacgggcatccgcggctgcggacgctagtctccgccgccgccggagccgcaacctctccgcacccggccccgtcagggcctctgtcgcgcctagcccctccccgccttacacagctcccgggcctcgcgggagcccgccgccgccgcctctctctcacgggaggcggccgccttagcgcccggtgcttgggtcggcgccgggagcgaggagcgagctacttcaaagccaccaggcctggagcggggacagaggcggcgactaggggaaggtgaagccgtcgctgcaggaggaggagcaggaggaggtgacgcaggagaaacgcaccgcccggagcccgtctgagctcagcgagagccccagcctgaggggagaaggggaagagggccgtcgccggccaaggaggaggaggaggcgggcgcggcgaggagcgagttccggcgccggtgtgcagccttttggttgagacgcccgcagccccgagcccggccgccgcagcctttcgatacactttgttgccggtcacccccgggcctgggatgcacccagggtaggtctcgtcccgggaccgagccccaccgtcgcctggtgcctcccgcctccgtgtgccctggttgtgagaagacgtctgtgtcgtgcggtgagtggccagctgcactggggcgacgctctttcccggggccaacagctggatgtgggtgaggggaggagggcgaggggggtgtgcgtgtgtgcgagcctcttccctcggcggctgccggccaggctggggcttccccgttccccctcctccggcccgggctgggcgggcgcgcgggcccgtgttgtgtgtggagccggtgtcccgagagcgtgtctgtgtgttttggactgtaagggaaaatggctgacggctccgtccctccccctcctcccccttcccgtcctgtctggggccgagtaggaggatggagtctccgggcgtggcgggcagcccccccgccgtccgcacccgggggccgggtcggtttgggggctggccgccccccgcccggcggccgctttcctacccggtctggttccacttgacaccaaacgccattactgaggtggagtgatttggagctggggagctaggcctcggctacgcctggctatcaggcctgacgacttgtccgcctccccccaccctcccgcgataacccgcagtttctccccggccctgggctcctggagtgggagctgggttatcggcctcctacacctccttcgccccgctttatttgcagagggccaaagccgtgaaaggggtttttgaatgcagaaatcgcttccaagctagcttggacctattacctttctatttttaactgtttctgcaaatattagcatgtgcgagtttggtagtgatcaggtcttcagattcttgtgacgtgaggcttagggttggataaatggctgatttttcattcattgtgaaataagttaaagagttatacagcaggtgtgtagatggcttcttaaattatttgtgtggatttctgtagcgactagaacttacacgagaatttgcaaaatttctagtagaacctgcttaaattaagcatgttattttttggaagttccatagttacaacgttaattgaatttacacggtgcagtttacaggtgtatataattgcttcagattgtcttttagtttaaataagcaagttgtaggtatagattaaatattcatgctttatttttcggggagagaagtatgtgtactgttcttttacctggaaacccatgagtccctaaatctacttaacgtttgtatactttcacttttgaggaagaatgatttggggtgcattgattaggaaactttccagcaggtacttaaccctctcggagctgattacccttaggtaaggactccttaaccatgactagcttggctggttagtacacttgaactcaaaaatagagactataaactctcctttagatctcgctcgtcttctaattcgctgggctgccattttggtttcagcaaataccttcaaattcttgaagaattatgtattaaatataaaaaagtgtcaacattcgttttctcaatttttaaactcatgtgctgtgtcatacatctaactttaaccctttaaactttatcgttccagcttttgggtggagtgaaagcttgaagtatttggaattggtgttccacaggtgaactcaaaatgtctttggtattttactgttttattttctctaatttaaaaataggacgtttggactatatgaattctctctaccccttttcttgtatttttttg

SEQ ID NO: 70711 - DNA, 646 bp, Homo sapiens
tactccctgcaaaacacttaaaaaaaaaaaaaaagatcttaaacactacctctcctcccccccacccccgccttctttttgagacgagtttcactctgtcgcccaggctggagtgcagtggcgcaatctcagctcactgcaaactccacctcctggactcaagcgattctcccacctcagcctctggagtagctgggattacaggcgcgcgccaccaagccgtaactcctggaatcaagtgatcccgcgtgcctaggcctcccaaagtgctgggattacaggcattatccaccacgccctgcctcgcagagcactttcaattcatgcacaagcccttgaatcccaaacactcttggaggcagagactacttttattccaactttatagataaggaagccagggcactgtcaagggagttgcctggtgcctgtaagcagggagctgaactggtagttagaggaattgcaattcccaggctctggttcactgcgctacctccaggaatgggggtggaagtggagggagggggcggtgttgcaggaagtacatttgcttcaatatgaacagttaaaatgcctggaaacattaagaaagggagcgtgcaaaaaaaaatttccctggtttcagccatttctttcttttttt

SEQ ID NO: 70712 - DNA, 4587 bp, Homo sapiens
atttctaacccttttttaggtcacttcaaataaaatttgcaaataactgccatgtggagaaaatatgcaaatgttgctaaacggaaaagtcattcggagtgctgtgaaagttggctcatttatttagctgcctcaagtgtgcacatcattctttttcaaagtgaatgtgtttaaagacaaagctttgtatgttttcccgcttcctctccaattggatattccaattataacgtattgattaacaaaataccctggtggtttgaaccaagtatgcctatgagcaggggttaattgaaaatagggaactgctgtatatttcaattcttttaggtactcccatggcggtaccctgtactcggctctactcaaaagtaaaacaaagcccagaaccagggtagtcagtgcatcccattgttgctatatgcagtttgaagagctgtcggaactcacagttttcgaacctgactcatgtttaccctggttcataggaaaacgaaactgaaacaaaaccgaggtccttcaccaaaactccatgagaatccacgaatctcagggcaggaagggaccctaatatcattaaacctagtggctctccaaggggcattgtagaaatctgtgtatttctggttgtcacaatgactggcgagagctactggcatttagtgggcaggagccaggcacgctaggatgttctatgatgctggtcagtcccacagagcgaataattgaatcactggacacatgtcggtgaaaaactagttcattatcatctaagcctagaactaacactgttttacatatgaacacaaagtatctttgcccagtttccatatatcctgaattttccacaaatgcaggtactgtttcaattgaaggaagattgtactgttttatttaaaaattattaatagttcatcattttggaaaatgaggttcctagtagcaatgctgctcatggaacttgagttgtgaaatcaacacacctttccagtttgcatttgtggctctactgggcaagtgtcttcccaccagttagtgtagctgtgcggcggcatttacatattataatacattgttttattataatcattttgctttcgtttgttgacagatcatgttttttgaaattgtgtttgtaggtttacataaacaatttaggttttgttatttcagtataggtaaagggggcgttagaaaatactcgttatgaaaaggagttgggtctttcacagggttatggaatgtagcagactccttttatagatgagcaaattgagacccaaagccgttaaacaacttgcccccgacagtgtgatattctctccctatctcgttcgaatttccgtctcgattttaaaaattgagaagggagagaagttatgtgtatagtaaattatgtgatgagcacgaactatttgaattctggcagcagaagaccttttgtgggggtggtggaaaccactgcgttttatttaatttcgtagggctgagggtcagaagagaggggaaagcggtcataagaaactacggatgtgcgggcgccggctcaaagccgggaatccactagtaaacaccttcttctatttaagggcctgcggcaccgaagccgggacttggggtggcctgcctaggagggaaccacaggaagaggttccaccgacggtagaaacccggttcctcctgttcctcatccaccgcagcggcctgagagtcaccccgagcccaggccggtaaccccgctgcagcccctccggcaggcccaggttgcaccggctacaaacattcccgacacccttgggccctagaagagccgttcgccacccgcggggtccccgcaacgccggtggtcaccggccctaagccgctgggcgccccgcgggaggaaactaggggcaaatgtagcccgcattcctgcggagagccggggtcccgggagggcgcgccagcggcggttccggatcagcgcgtgtctgtctcattgttccctcaccgcggggggcgggggcggaggcgcgcgcgcacacgtcggggggttggccaggaggggccattgtgtgtttctaggcggcgcccccgctgcctaggcaaccgcgcaggaaggtgtccggccacctgcgcgcgccgccggctcccctccatttccccccgactcccgccccggtcaccatcctaccctcctccctcctcctttccccttactccgctcccctcttttccctccctctcctccccttccctctgttctctcctcctcttcccctcccctcccccgtccggagcactctatattcaagccaccgtttcctgcttcacaaaatggccaccgcacgcgacacctacggtcacgtggcctgccgccctctcagtttcgggaatctgcctagctcccactaaggggaggctacccgcggaagagcgagggcagattagaccggagaaatcccaccacatctccaagcccgggaactgagagaggaagaagagtgaaggccagtgttaggaaaaaaaaaacaaaaacaaaaaaaacgaaaaacgaaagctgagtgcatagagttggaaaggggagcgaatgcgtaaggttggaaaggggggcgaagaggcctaggttaacattttcaggcgtcttagccggtggaaagcgggagacgcaagttctcgcgagatctcgagaactccgaggctgagactagggttttagcggagagcacgggaagtgtagctcgagagaactgggacagcatttcgcaccctaagctccaaggcaggactgctaggggcgacaggactaagtaggaaatcccttgagcttagacctgagggagcgcgcagtagccgggcagaagtcgccgcgacagggaattgcggtgtgagagggagggcacacgttgtacgtgctgacgtagccggctttccagcgggtatattagatccgtggccgcgcggtgcgctccagagccgcagttctcccgtgagagggccttcgcggtggaacaaacactcgcttagcagcggaagactccgagttctcggtactcttcagggatgagtcatgtggcagtggaaaatgcgctcgggctggaccagcaggtgagccgcaagaaccccaccgggctggctgctgcgtgaattcctcccctgacctaacctggctaatggcgcagcgctaaccggcacccttacttttcattttctgggtgccccgggctggcgggtgtgagtgccccggggctatagagggataggaatgttggttggggctgtcgcccgggcccggtctcggcccgctgtattgtccccgggacgagcacaatggcggcttttgtgtgtgcgtgcgcaggcgggcggagggggaggaagtgcgcgcgctctcgcggggacgcgcatgcgcgaatcccgactgattagtgacctgggggggtttgcgggagtgcgcagcgcggcgggacgcgactggaggcccttttggcttggagggcttcggccttcacggctggcgcagcctggattcccgtccggaggacctggcggcacccggtgtttgcgtgcctgcgagcaaggggtagaacgcggcccaggaatgtgggagggggcggccttcgctcggggtaatggcggcggcctcttttgtgtggtgctgggcggcgctgtggctcacctccgggagacggcgggtctcgggcgggcgaaggcctggaaaggaggatggaatgggtttcttgttttttcccgggttccttccgctggctttttcgcttcagcccaggttccgcagggtccgggggccctgcgccgcagccggggaggctgcgtttccggagtggaaagttttgtgacgcagaagattggggaggagtgggggaggggtgggggcggggaggggaggcaggaattggccgctgcgcgctgggccctggagatagaggttggacgtggcggggaggttagggagccagcgaggccctttctcctccttgcttgccccagattgtccctgtgtggtatgttagccgggagtcccgcgttgtttttctggggtggaggggtcatcgcgggttgtggtagtgtcttcgtgttagtgactgtgatccaggaatccgccattggaaaaacacccggcttaggggggaagtaaacagttttgttgttgacttgttgctatctgtggagtagaatcttgcaatgggtcccaggcccccgggttttttctcttagccagaatcccctcttctaagggtttaggggcagaggagagaaagatgtgtgatttgagaggagaaggttatggactttggtggcaggaagtctgcatcccaccgcaacagtggcaccaggcttcagataagctcttgtgtgggttatgcggagcttttaaataaactactgtctactgtgattaggggagcgttgatttcacaaactccggaataatcctgagacgaagtttagtggcacaaattaattgaatacatagtttaatgtagtcatatgtaatattttttaggaattgatctgttcctttggaagcattttctacccgttaatgaaccaattatattaaatcctctaattgctgacacatgttgaatt

SEQ ID NO: 70713 - DNA, 869 bp, Homo sapiens
ggaattacaggcgtgagccaccatgcccggccgttttttttttttgagacggagtctcactctgttgcccgggctggagtgtagtggcgaggtctcggctcactgcaacctccacctcccaagttcaagcaattctgcctcagcctcccgagtagctgggattacaggcgcccgccactacgcccagctaattttttgtatttttagtagagacggggtttcaccatgttggctaggctggtctcaaactcctgaccttgtgattcgccctcctctgcctcccaaagagctggaattacaggcttgagccaccaggcctggcctcgtggccttttttctttaggggcgacctggtgggttcatctggagcaaggatgcccttcctcactttgctcagagctctgggaaatttctgggccctcttaggcagttctcttgattctcccagtcatgaacaaaggcccccgtcccccactgggactggaactctttgttctggaaagctgagtactgcagggcaggcctgggtcagaggccactgcctggtgttccctcggggcagagtcccctctagccacactctcactggcttctgaaagaggaaggctgacgaactgggtgactcatcccatttctggaaaagagaggatcaggagttcagatgggcatgtttatgactgacgtctggatgagatgacacgataaacataagggcttaacaaaatttagcaaagacttgggcagcagcccatgaagaagtgtttagtttttctattaaaaaaaaaaaaaagccgggcgccatggctcacacctgtaatcccagcactttgggaggccgaggcgggcggatcacgaggtcaggagatcga

SEQ ID NO: 70714 - DNA, 2182 bp, Homo sapiens
ggcaggcggatcacctgaagtcaggagttcaagaccagcctgctgaacatggtgaaaccccgtctctactaaaaatacaaaaattagccgggcttggtagcgcgcctataatcccagctgctctggacgctgaggcaggagaatcgcttgaacccgggaggtggaggttgagggagctgagctcatgccattgacctccagcctgggtggcaagagtgaaactctgtctcaaaaaaaaaaaaaaaaaaaaaagccttaattccaaagccacaaatgagcctacaccattggctcatctcagcctaagaatccaattccaggaggtaggagagggtgacctgcggtggccgagaaggatgtgacggctctccgaggtgaacaaccgttcattctcaatgaatagtttcacatggacccatggacccatttcagggatttgctgttctttaaaacacggcagaaaaaaccccaaacaaaaattcctatgtacaccagtcaccccttctctcttctgctttttggctaacatcaggccagggacacatggtggccctagctcagtctttgctgggacttggtgacaagcccagggacaaagaaaaccagtctctactctgacctaccccaaagggtgcccattagggacggggcaaataaacaagctttgagatttttacatggaaatctcaagggaccaagatttcactcactctggtaaaacaaaaacaaaaacaccctccttctgttccccggaactgagcttctgagtaacaactgttggcctctacccacacacacagctcagtctctatttgcaacaagatcctggatgctgggctttgatatgaattctaaccctttgatttcagcacctgtctgtccctgctgtgttgtaaaagtggggtgggggtgggaagctataaccacttctagacaggaagttatttaggcaaaaaaaaaaaaaaaaaaacaaacaaaaaaaacagatgaagcattgcaccaagtacaaaggtagccacacctcaggctgaaaggttccttccagagagataagatacccgacagcaaaagtcacacagctccatgagatctgggtgaaatggaaacttcctgtttattttagtcccttcagcctgggggtggagagggagcagcagagatggaagccgtggctgctacttttgttaagaatcaaaactgctggatcagtccagaagattgtggcatcgcctgtcccatcaaccatgccctcccgttcccaccaaggacacgacagagataataccatgagaatatatgagttgcccacaactagcaccagatgctgttggcaggctcattttaacttcacagcatccttctggggatgggaataggagggagtagatacaatcgtctttttttttttgaggcggagtcttgctctgtcgcccaggctggagtgcggtggcaagatctcggctcactgcaacctccgcctcccgggttcaagtgattctcctgcctcagcctcccaagtagctgggattacaggtgcccatcaccacgctcggctaatttttgtatttttagtagagacggggtttcaccacgttggccaggctggtctcaaactcccgagctcaggtgatccgatccacctgcctcagcctcccaaagtgctgggattacaggagtgaaccactgcgtgtttttttttttttttttttttttttttaacatatcagagctgcgctggggagggtaggtgacgcaatcacagtcaagtaggcgctcagaggctgagtcaggacctggcttgctctcaggccctgcccccaccccagctacttcctcctaaatatctctaatcgctcagtttcttggacctttagttttagcactgggactgccctgattaattcctttagcaatgatcacacccataagtacgccatttccaccctccccaccctagggctctctggggaagatgacctagtccagggccacccaacatctcagagcagtcccaggtaattctcaggatggtagacagggcttctgagctcagcacagggatgcttgatgttgttcacacctgtgaagaaaggcagaaatacacatgccaaagacgtggagagactggatccctcatgcattgtgggagggattgctaaatgttgcagccgctttgaaaaac

SEQ ID NO: 70715 - DNA, 1167 bp, Homo sapiens
tccgaaaaacaactcagggacatatatcaagatgttatcttcaatttcttttttctttttcttttcttttcctttattttattttattttttattttattttttgtgactagatcttgctctattacccaggctggagtgcagtggcgcaatttcgggtcactgctatctccacctccggggctcaagccatcctcccacctcagcctcctgagtagctggcactacaggcatgggctatgtgatctttctgtgctttaatcttcccagttgtaaaaattaaagaacagtagtgactacctcctaggttgtcctgacagtaaccgagaaaatccatgtggaacagcagaaacactaagaagaatgcaaatgtgctttcctctcttgtatttccatacagacgaccttttccctgggcagcctgtagccatctgcttgggagcagggaaggtttttccaaagttcttgagcaaattaaatataaatcctaaagatctcagatcacaatgtctcttccatgagagaaagaagatacccctatgccaacctcagtcaagccgtgagacttgttgccttttagtaggaggatatgacctgcagaaactgaaagcccaaaagtcgtcccttccggttcccaggacttgtaggcagaaacatggaggcaggaccaggagaggtgtggcagtgggtcccaaggtcactcttctgggcatatggccagagaaagggtagaaagttgggtaaattgaaagagaaaccagaagccaaggtctctggctagattcaaatctgggaccctgagaggagattgtgtcccacactgccacccccccccaccccccaacctgggggccacatggaacatcttggaggtgcaggacagagagaggagggcgggggtgctgctgtccagagttgccctgtggtactgcgtggcctggacagaaagttctgttctggctggatttcagcaaagagggagtcaggctacaggtagatattgaggcaaaaacgtctactgagcccctagaaagctctgccctgggaaatagagagagagtggtgcaaggttgaattacagttggagctctcaaggaatgatctttgaagccaagcttggtgagttcactgatgagcagggtggggagggtgtaattagggaagaatc

SEQ ID NO: 70716 - DNA, 1787 bp, Homo sapiens
aatcccagcactttgggaggccgaggcaggtggatcaccaggtcaggagttcaaaagcagcctggccaagatggtgaaaccccatctctaccaaaaataccacgcccggcccttggtgtaacttttattgaaaaaaaaatccaagtgtaagtggttacgcgaagtgtaaacccatattgttcaagggtcaactgtatcgggaaatggagagacctactttgttttttgtttgacatctgctgcaatgggagagaaacctactttggatgcaatgtaaagaacgatgatttcagaagaggccccaggaaggtgtatttgtgggcagtgggcagagcctgttggtgagctaacccttcatttacaggtgacaaacaggccatgcgcactacgcggcctggtcaggaggacacggcactgggagatcttccccagggtgtgacctttggcaggttaggtccccaccctggcatcccttccagcccgggcattctgcgactccaggtgcgtgaggaacgtttctggcaccaggcacgccctgggactttccccagccctggcccccgcccccaccgagtaggtgcgggtgccgcggcggggagcagacagaggtcccggggccgccccaccccgactcccgaacctcggtgccctctggcggccacgctgggcaggaccgggctcatcgggggcgtggctcgccccggaggctccgccccttctccccagggtggggccggggtggtggttaccggcagaggctgcagaggtttcgcaaggacgtgacctttatgggaaaaaaaaaccactgtgtcacgcacggttgccagccggggccagcgagctgaactagttttctgaagcccgcggagggaggagccagagcggaaacgtccagcccagtgactcgctgcctactgcccctccaggaccgcggcggcgcgccctgagccccggggcaccagatggggcgcgagcccgcacctaactgtgtccgggcctgccgttggggcgacgtcactgtcactacactgggagtcagcggaatgagggcactctcgcctctcttcctccttcctccaattccagaaatgaggcccgggagcccaggctgatccaatccaaccccactgagctggggtttggattggaagggcggatgtgaaacgacagaagtaggatagtttgcgaataaagaacaagggagttgggtgctttagccacagaataggttcagccaaggtcatttagaggtgcccagcaagaggggagtggctacccctcccccatcctgatctgaggcatgcagtggggacgtcgggggtggccacaggggctgtgtgtgtccttattaggacccgagaaaaacccagggactgggaggcaggaggacagggtacccactgggtcccagctccaccttcatatgtcactctggggagcaggtcacttaatctctctgggcctcagtttcctcacttgaagaatgaggggtctggacaagattatggaatatgtttcgagtacaatcaggcctaggaactgaaagtccctgtcctgacaccatccagtaagtcagagaaaaaggaagggtaagaggccaaggctgtcactcacccggttctctttctatagctcccttacaaattctcacatgggcttcaattcccttcagcaaacaattgtgcacttccgcctgtgtgccaaacccaggcttgggcccagctttgtggggcctggggcaagagtacgcacggaggaccacacactgtatgtctgaatatttaaaa

SEQ ID NO: 70717 - DNA, 887 bp, Homo sapiens
ggtgagtctgtgaagcttatttcatacttaataggtattcataacctgggtgctactacactgcagtgggaaaagggatcagaggccccaaacacctctgtctgcttgctatgacaatgaacataggcaaaggctgtcattttgcctttttaaaaaatccaaagcctaatttgaatacagattttggatatgtatggtcaaaaatggcctggtctaccgtggctttcctcccttctatgctgtagagaaatccacgacagctggctatgactcagctcaacaggaaagaggtttctgacactgctgatgtcaggagagttgaggtcagtgagaaactagttcacatgtacaaacactgaaaaggttttctttaatcatctgcttggtaagaaacaggagataaaggataaaaggagagtgttaaagcccacactgctaaagacaggcaaaatgtttgtaaactctattgtatttcaacatttttctagttgtcagttttatgaatgttatataagttcaagtccacataaatatggtaccagaaattctctgattacagaagaatactccttatttgtatatttaaaaacaagctaacaaagtaaaagtcaattttaggaaaggaaaaactttcatttacttacaagcattttttgcagttgttccactgtttggttagccacactgatgccattgatttctcgaatttcatcaccaacatgaagtgtacctaagaaattatataacattataaacatgaaatgatatatgctttcatagtaacaaaatccagaggcatcaatgtaatttttaaaaactaagttgaatattgagggccaatatttcagaggcaggtacaagtttggttgcagcagaattatttaact

SEQ ID NO: 70718 - DNA, 612 bp, Homo sapiens
agctgggattagaggtgtaaatttgggaatcaacagtacacagatgatatttacagccatggtaaggaatgaaattgcttaggaaatcatagagaagagtcagaggattgagtcctggtgcacgccaatatctgaagtcagaagaaaaaatctagcaaagaaaacaaggtctagacagtgaagcaggaggaaaatcagtttggtatccggaagtcaagtgaagaaactttttcaagtaggaatgattagtagtcatcaatgttacaaaggtcatttaaaatgagaactgagaactgaccattagatttggcaatttggaagttactggtgaccttgataagagtggttttggtggcacgatggaggcaaaaatccccattggaccaggttcaggagagaatgggaggagatgatgtagtgacagtaaatacagatatctttcacagtcttactgtagtaaaaatggagaaatgggatgtagaagaaagtgtgaagctgaggatgcctctttttaacatttacaagtggagaaaatagattaataaacttccatgtatctatcacccagctttggcaattactgacattctttcagctcctcccctggcctgc

SEQ ID NO: 70719 - DNA, 682 bp, Homo sapiens
tttgtaacaaaacctaacacactattaatagtattatttccaaagtaatatgttttcaattttcattttttatacagcagttaatgcaattttgaagcatgccctgaatagattcagtcattatcaagtcaaactaaaaacggtgaaaggttgcgactattaccaaataggtatgtatttcaacatagcaatgtgatattttcacaaacatacccaaactgcattttaaaagcttctgctcatctggagtcacagtggaatctgttgggtcctgccctctgggtccagtactcctacatgagccagttgaaaaaaaactgcaggagtaggtggtggtgcgggggtacaatgcactaatactaggtttttgaacttgtgaataggatttgccaagtaacaacatttaaaaaacactatctactattacaaaactattgtgaccacttcaatatagcacatgggtcacaagtaatgcccactgggaaattaatcccctatgtaaacacagtggtttgtttcttgtcttcacaagcaattcttaacatatcaaacaggtagtttaaaaaatatcagtaaatagccttatatagtgaatgacattgtaatgtactaaccaacttcaaaggagaaaaaaaaacagtcaccaagtttaaaacagaatgtaattgtgatttttaattaa

SEQ ID NO: 70720 - DNA, 1575 bp, Homo sapiens
gtttaaacacacttttttttaagtttcttagacctttgacctagtcctacttacttttgcaggtagaagctgggatggatcctctgccaccccaaaccaaatcagtcataaccattgcatcagtttgcttgctatcctgtgtaagttcttgtaactctggtatggatgtgtatctgcgattgtttctaagtctctctagcccttatttccattcttctctctagaaataagttctccttcttgctcctcaaaaccttctcttcattcagaggcaggtgtatcagtgcagcccctgccatcactaacagtacagctcctgatctctaggagagggagtgccctttcaaacgatgtagatatgaaaaccacaacaagttccttctagtcgcttgtggaattcatggattttggggtttttttttgacagttctacttgtgtcctgtcttctgtttatctgcctcacagaacatctaaataactgtaaataaccatgccagccctgatatggccttgcagatcaggaaggtggtacaggtgaaggatgaatctggaaaatgatctcaccttgaacaaacacactggggattacaaaataatcatatggttaattttttattttctgctttcattttactgccatttgcactctgaaatcaaactagctcgtgtaatcttacttttaggcaagtttctggctaaaatgaaaatgtcaatattggtatttgtaaaactatagatgtatacagatataaacaaaaacagaagcacaagcataggtatttgctcaagattaaattgttccaacttagcaagaaaaatggaaccattattgtgtcctcaggagaatatcccatatgcccatgaattatttccaagtttcagacattaccaagaaaaaaatagaagtccttgaatgttcaaataacatcatgagcaatttgcaaacaaccacaaaactctttacatagacaaaagccagcagttaactaaactgatcctttgagtattacaggaagacacagatacctaaatttattatcctcatagactatgatttttacattagtcactcctctgaaataagatactgaaggttcctgtgaaatgcaggtactttaatagctaatagcaaagatttactgggcatttatctacatgccaagtgccatttaaagtgctttacaagtagtaacttatttaatcctcataaaaacactaggagacaggtactatttcacagatgaggaaattgaggcttaagacaaatgttatataacttgtccaaggtcacatggttacaaagtagcagagccaggatttgaatataggaaatctggctccaggttccttagctcttctcctctaatactgaggctctatactcaatagaatttatgacaatgacaatgaagacaatggtaaaactatgtagtgttgtgattatcagagtacttttacacttcatttcattctcaaaagttgctagggtagaaactgaggtgccaagaagtgaaatggaccctgtgctaatggtaatgcctcctaaactcttattgctagcctaggttcttctc

SEQ ID NO: 70721 - DNA, 968 bp, Homo sapiens
aaaccccaaactccaaaccctgtcattatctttacagtcaattatattttgtttgcagatccaggagtttatatcaactcttttaaaacccttcttctatttatctctattttagtttgtgcagaagagttaatatagcaggcctaaactactatctcataaaaggcttgaaaggcctactaaggttggcccttgagaggtttatctgggaacttggatttcaggacggtcctctacattcctgactgaaaagactgactcactgtgtctaaactgtttgtgctaacaatgtgatttaggctgaacacctgctttctttctgggagtctggaatttggttaagtgccaagtggaagatgcctatgtgaccagcccccaataaaaacccagggcagagtctctaataagcttccctggttggcaccatttcacatgtgttgtcacaactcattgctggggagacccttgaaagcttgtgcctggtttcccctggacttcagctaatgtatcttttccttttgctgatttctctttatatcctttagctataataaatcatagctgtgaatatgactatatgctgagtcctttgagttttcttagtgaatcatcaagcctgggggtggtcttggggatccctgacacacagtttgcaaaactaaaatcaactaaacattttgatactgtgagtcaaaagagatgtttactttgctgaaagaacaaatagcaatttatatcatcacacataaaaagaaaaaatcaaaatagattatataagactagctatgaaaatatgagcaaatcttcaaatagattaaaatgctacagtacagatatttattgcttggtatgagacaaacatattttcccttaagcagcaagtttgctggtaagtagtaatcagttccactctatcagtataaataaatttcacaaacactcccttccccaggcataaatactagacc

SEQ ID NO: 70722 - DNA, 1106 bp, Homo sapiens
tctacccatacaattttcctttcctcaattgtaggctacttagtgttgctgagagaaatcatatctgcatgttgataagcgctgctacaaattccttgcatttagcctcagcgggggtggggggaggggccttgaggcagcctagcaatgtctcttatctctcttaacctgctattactaactctcttatctctctactctctaccaccatgcctactctcagcaggtggctctgcctcccacctgctgaaaatcaggccatcagctgagggacatcctctggttccttctcctgcctgcaggcctagctctatcagtaccttgactttcttttggtcttgatggaagaggggcccaccctccacctgctgcctatcgaagatctcagtccatcagtgcacccttttctttcctcttagctctctcttctggcaaaaaaggaaaaaaaaaaaaagatactggaatccttcccattttaatcgctacccctgcctccacatgcccctgcatctatgactgtttctctctcctcttctcagtctagccatttgaaaattatcctatatttattttccctgcttcctcactccccattccttcctctgcctactacaatcttgtttttgtccccagtgcaataccgaaattgctctggccaaagttcacactggtttccatgttgccaaattccatagacattacagttgttccctcatttggcttctttatagcatttgacaacacagaaaatctttttgatctcagcgtctatgacagcattctctgataataattcttgtacttctctttccccctcctggtttcctctgtctctttccatcctttctttaaatttaggtgttcgtcaggatcattcctcatgaccatttttcatgaccaaaaatggttcctcatgatcattttttttcattgtggcctcttaatatactttctttaagcaatcacaggtatttccgaagtttcgtctattaccaaaacgatgaagattttcaaatcttttctcttttgttcagattgtggtcctaaattttagactaaaatatttaactgatcaacatttatatttcaaaagttactgagatgca

SEQ ID NO: 70723 - DNA, 382 bp, Homo sapiens
atactaagaaaaattgaatatatgagccaatgaactttgagagctctattatataaacatgagcctcctcatctacatactgaagtcatataagatgagaaattcaggttaagagacatttacaaataaaacgttgatattggggattatggccaacatgttacatgtaatatcaagccatgtttacacctagaattatattgaacaagtatgagtcattttagttaacaaatagccacatactttcagaagtaggtaatctacactattttttaaaaggcaaaaaacaagatgaaagaagtaagttttcttttcccatgcagttgatctcaagcataatcactataaattgtcttaggtttagagattcatcagcagtttt

SEQ ID NO: 70724 - DNA, 850 bp, Homo sapiens
tgagtctgaacactatagcctttaaaatggttcaaaatctacacatttggcagaacttttctacagcagttgctactctggaagtagcacccggctcctaagcacagccagctgccaaggaacccagggaaattattaaagcttacctctagctcttggggctgccccagcctcctatgcacatgagggcaggacaacacagaaagagtcaccacagcatttctcctgcctaatgcatggcatgatttcccaagctttcatcatcacctaccgctgacccctatttcaggtagataaaacagaaatgaggaggttgttcagatgattcatgtgggtggctattgtgctagctgggacagtaacactgctctttttttaaagagttcacattttattcactgctataaataacaatttagtttttaaaatactgcatttccaacactatactgcagaagacagtaaagctcaaattttccagtagataggttgcctttggcgacagacctaagtaaccacattctgagggatggcctttgcctgacccctcttctcattgttcctcacctctgggatgagtaagcagggcaaaaggtatgaagtaagttgattgggaaagcctaaattaaatgtctaactcaatcatttctagtctcaaactcactatttcctgtatcttccccagcatctactactaaactattcaacccagatttactgaaataaatcaggaaccaaacaaactcaccagtaatatagctcagtatcatttggcaaagtcatatttcctgacttaaaacatcagttatgtaaagaaaaacacaaccatggagtcacaactgcaaaaaca

SEQ ID NO: 70725 - DNA, 2446 bp, Homo sapiens
agtcgaggggagtctcgagcactgattgaacagtcattgcataacaaggcattaaaaattcgaatgcccccaactctttccacgttcgtgtacaccaggagggaatttgctgaaactgaaagcaccccgtcttaaatgaccccctccaatccgagcatggggtgtacacaaaggcatctgtctaatatcccgcacaatagacacacaccccacaattaaaaccctggactctctcaccacacaagcaaaggaaatgcaagctgctctgtttcaaaaatggtctatggtacatgcaaggtaacaataaccccaactgaagcaactataaaatcggctgtgccacgtccctgtgcaaccgtcagataaaatgcaggcagccggccccacgccttacggggtggccaacctcggctcggtggcctcaatggaccgctgagaacccccaggcccccgcctggcaggagctccaggtacacgtctataaatactccaggatgagaaggacgagaggggaagaggggaaggagggagggcagggggcaggccccgagcgggtgcgggaagaccggggcatcactgaaatgcatttttccacactcccgctccctcgcgtggagactcactttccgatcacctcgcacagctcgtacacatcctcgaacagcacgtcgtcgtcggccatggtccggaggggatagcggccgcagcgtggagggcttcgaaaacgggggtgggggcgcccaagagctcagtgcccagccccgggatcgcctcctcccctcaggacccgcgagccctcggtgccgaggacgctcgagtggggccgcgaggcccagagactgcggcgccttcctctgcaggcgaccgccccggcgcgggcggcggggccggggcgcgggagcgagggcggcccgggcccggcgccgcccgcccgcccgctgcttctcgcgctgctcgggccgcgctgcccggcgtgcggatcctcggggaccgcgcggcgtcgcgctctccgctcgtcagcccgcgcgggccgcgaggccgcgaccgctccctctgtccgaggccggctccgtcgcgtcgcggagcagctcgggctacagagggggccgcggcaggaccatggagcgaggatcgccgcggagggaggtggcggcggcggcggatcggcgctggggaccaggaggcggcggcagagacgctccctcctctttctcctcctcccgcagccgccaccgcccgcccgggagtgggagggggcttcgcgggaccggcgctctgtgcgggcgggagccgcggccgccgccttctgctccgcccctacgcctcagcagccgaccggctcgccagccccgctcacccgcctcgcgcagacacgccctcctcccccgtcggcggcgcggcttccagaaccacaggctccgcccactccaaccggtcgggaggcggtggcccagggaaaggggagcgggccgagcggcgcatgcgcggggcgccggccgcgtcacggcgaacgggcgggcaccgggattctagagggcgcggggggttgagtggggcgcgccggctgcagctgccgaggcggggctggttggggtcgtcgcctccgcgcctagccgcgaccaagccgcgaaaggggctggagacaaaaggtccacggctgcacgctcgttgtccggcaagaggcacgaaactctggccgctcccctttccttcttttgtaatcgcagggagcctttcccagttttttgctgggaaaagaggcagggaaagggtgctaatgaatgagaaagctaaaagagaggtggagagaggttgtcactgaatccgtgcttggcagcggatgcttttagtgctaccctgtcattccttaatgaagatgagggctgggggtaaggggaggtcgtccaagaaaaggactaaacaaaaactgcctaggaaggtgtgcgacagcaaacggtcatctatagagacagcttctcccacgttctgccccaaactcaacaaatatctatccagcgcctaccctcactagagaccaacctagagagaagctaggaaggcagggacaaaccgtgactttaagctcatttgtatattgtcctcaaactcccaggacctactctgctctctatactccctataaatgttagacttgtcaggaacagaatgcaactagagggagtgcaggcacaggagcagccagggagtgaggttctgggtgttgccgctgtgctaggttgcattcaatatgaagatttctgttcaactgagcatgtgcggaatgagccagcgccatcagacaggtatatgcctcagttgaagaccaatagtgtctttgttcctccgcacagcaaaagtgcccaattagttcataagtcagtttccagaaatcgtctggtaaatttctcagtgcagtattttttttaaaaaaagtatttattaatac

SEQ ID NO: 70726 - DNA, 987 bp, Homo sapiens
tgttttctcctcattcttagattatttgttatctactttgtcttaaaaggagaagctgagatatgacctagggtttttgtgtggtggatctgtgtctgctgcttgtgggcaggacaacacagtgtatcaccactgagtcgtttccacccttttacgtgtttcagtttctctctcccgaggtctgtgacctctgagagggctcagaatgccagctgattagcccttatatgcgtttcctggatgagctattttttaaaacagtaatttttgttgggaatttccctgtagggctgctgcatgtcacaggggggtcaaccccccagacactcccatgaggtccctggtcacccaggggcaccttttggctgggaggagaaaaatgccctttctcttccgagctgagaaaactgtctctcatttaccgatgaaaacaactgttctgttcctcatgcaaatgcacacagacaagccaaaatgaaattaatttggggagaaaaagcaatagggaagaccctttagaatgtatcttcgaactagaattaagatccttaaacaacttcctaggagaaaagaaaaaaaacaacagccaagaccacttcctgtaaactgtgctcagccacccctaaatttgtagctctcgtatgctattacacacaccaaactcaaatcctctcacagtacaaggtaatctctggtatccctaaagaggtcgggttatgcaatacaggaaaacagaactttagacctaagaagaatctgcccatgactcttgaaactccaaagaaagcagaactcccccaaaggggtgagtggggcatttgttctgattcatttaaaggggttcgaatcattagaagccttctctaaattttttggtactgcagatggcaaacggggaaggcggtatagggtggaagaaaagtaaacgaaagaacatttgttgttttttaagacaggaagcaaatacagaaaccaagtgcatttttt

SEQ ID NO: 70727 - DNA, 1222 bp, Homo sapiens
gacaactcgaagaaaacgggggacaactcgaagtggggagggagcttcctggccataggtagacaagagacaaatggttgcattcttttgagcttctgattagcctctccaaaggaggcaattagatatgcatttataataaaatgggagacaggtttttcccagttcccagcttaacttttccctttagcatagtgattttggggccccaagatttattttcctttcacaatatgattaggttaatagtgatttgtcttataacctttcaggaacccctttactgaaaatgagaatattgtgaataaattatcatttacatgctcccattgtggaatgtgatcataattttagcaaagggcttgctgattactggactgagaatcaccaaagaagtgagataaaatgtgtggaagggtttggaaggcctctgcaaagagcagggagaagggagtggagaaagataaggcaaaagcacacagaaatgaaaaagagtacagtaggtcctctgtacctgatggttccatatcagcagattcaacctactgcagatcaaaagtatttgaaaaaaataatgagaaataaaaataaaatcctaagacccccaactgactgaacagacctcctcttggctaaggggaatcccagagaaacctgaaaagtggagttcctggccatgaaaggataggaggtaagacatgcctcaataggcctttttcttattaatttttaacccaaattctttcctaaagagtaagcagaaatcagtggtggaaaatcagaaatggacgactcattcctttatcatccttagccaagtatctggggcagtgaccagattttccttcccgtttgtggtttcaacacagcaactgaccagcattccttcctgataagaggccaccgatcatggagtggttccggccggtctacaaatgacgtacagtgagggttttcacgtcctctgcttcaccttttgacatcagaaggctgagaactccaccctctgatcatgctaacacaccattttttgtacatgtgacccatgaagaggcatgaaattcgattggatatatgcatgcttctttcataaatattcataaatcctcctacagcttattaaatatgtatacttacacaacccatccagcacaaattcctttcttatccttccctccctcaaagtgtttgctctcagcttttactggaagctacgcatccc

SEQ ID NO: 70728 - DNA, 676 bp, Homo sapiens
gaaataagaaagtgcaactgtaaaacttggggtaggtaaaatggttaactcctgatgggcagaaatgaatcccctcctcaattcctttccttccttgtcgctctgcttctagtctgttttgtgggcattgatggcctttgatgttcagtctcagtcctgccacttgacaagacaatgcttggcaaacctagggaattaggcttcatgtttaattctccttcagcctgttgggcgtaggatgtgcttcctgagctgtttgctttcacttttcgatcttgctgtgttagttcctaaactcaaccatgttgtactaagacttaagcaaaatgtaggaaatgcacagtgacccatgcctgtagatcatgtgtagctggaatctttgaacttcctatctgagtctcacaccttctctattgcacattgtcctgttgcttcatctctgtcctactttctgattgctcaagtcctcccatttggtatccacaatgtttgagtatgctagcttgcccttgtaacttattattgttgtttcattctgtcatttttttttttggttgtacttctactagccttcccctttggctagatgaaggagccattgctatgccctgccttatctgacagccctgccgggcatggccccatttcttccctacactctgactctgacctaaaa

SEQ ID NO: 70729 - DNA, 989 bp, Homo sapiens
acaataatgaataaatattgggttctgtctgcagcaattattattgctgtgttctgacactgattttttattcctctaatttcttcagtatatattgtctggaattgtaacaagtttttcctctctccaatttatttatttattcaatgattatataagtatgaaatcatggctatttattttccaggttataatccaaaattaatatttactttgttgctcaaattgttctagctttggtcattagaacactctcaggtgagctcctgtgccctttttgacatacccacatttaaaaaatttattttctatttacttttatttttatttattcactagaatttccttactctctatcactacagatgtgctaagatcattccctgccctatcatttcaatcagtatattccagttagagttgtggatttctctttgtcctctcagatctaatcttttttcctttttttttttccacagctctactgttaggtgcataaacatttgggattattgggagtgttaaaagataaactgagatacattaaaatattaaagagtttatttgagcagatagtgatttgtgaatcaggcagtggtttggggctacagtaaaaggacacagggaggaaacttttataaagtgttcttggaagaaagacaaagaaaacatttgatcagttaaagtgaggcaatagccttatttgggtcattccagcggaaaagtccctagttagaagttagatgatggtttctgactggtcgatcttaaagtttgttttaccatttacattgagttgggtttcagtttgcttacacaggaacacaaattgctggaaccatctcagcctaatggcctcccaagtaatttttttttctcagaagcagtgatccctttatcattatgtgatccacctttatccctgataatatttctttttttctctcttttctttttttttttttttttttttttgagatggagtttca

SEQ ID NO: 70730 - DNA, 1334 bp, Homo sapiens
taatgaatccactactaaattttatctatcttgtagctctaaaattgcactgtttagaatacactatggtagccactagacatatggctacttgaacttgaattggttaaaatcaaaattaagaatttaatttctcactcacattagccacatttcaagtgctcaacagacacatgtggctagtgtctaccatattggacagcatagatttaaagcacatttccatcattgcaacactgcaatatggaggatgtatcctcaatacattgatattgccccctcaaaattcataacccctagatatcttatctctgtatgtgaggatagtgtattaacttgcacctggactgagatagataaatgcttatctccagagatgtctgaaagtctggtactgacccttgtctaagataaggatggaatgtgctggttaatgatttatactgtgctatacaaagtccaaaattcctttggaggtatcctctgctggcttgtctacattgtttaaggatggataggttgatggtttgcacctgctttaatcatttacacattctgattttatttgtgatcagtggaggataaaaccttcaataaacttgtgtcttagcttccttgatattaagatatcttgcacatatcttagatttttataatctgaatgcaaagcacatcctttgcaattgagaaaggactctgtgagctgctcctggatatgtgaaacccctcagtgactgaccgtattttctttcttctgctgtacttgcccttattaaagccttacatgtgaagtaagtcctttcaattgtctgactccgggtgattgttataccctttgatatagtttggatatttgtgccttccaaatctcatgttgaaatgcgatcccctatgttggaggtggagcctagtaggaggtgttagggtcacgggaatggatccctgatgaatggcttggtacacagtaatgagtgagtttgtgctttattagttactgtgagatttacttggtaaaaagagcctggcaactcctccctctcccttgctccctctcttgccatgtgacatgcttgctccagctgcaccttttgccacaattgtaagctttgtgagtccctcaacagaagctgagcaaatgctggcaccatgcttcttgtacagcctacagaactgtgaaccaaataaaacttttatttttataaattatctagcctcaggtattcctttatagcaatgcaaaacaaactaacacacccttaaaccctatatttaaggctgagatcttggaccctcctcctaaaatttaccttaaaaggtgaagcaagcactagtct

SEQ ID NO: 70731 - DNA, 1645 bp, Homo sapiens
aaaaaagagtgggtgatttaatgttactcttctaattttaaacacttaagtttctgatagtctatgattttggagaacacatttctcagtaaaaacacaatagttaaagaaggaggtgcttatgacatatacagctgcagtgacctgaaaacatattccttcctgataatgtacagctggctttatttgtatcggtgattgtaccaacttgatgaatagcaaggcagatttttaccttctgaatgtaagctaatttttactatatcacattcaagcagggcctttccagtgctcctcatttgtttgccaaatgtttttaaaaaaatgaagtatttgccaactctcattaggtctaagttctaacagtactgcaagcaggaaaacctgaggtcgttagtgctttgcaaatgaggaaacccaggataaaaagcttacttgagtcctaaccgtattggaaaggcaaactcatatgtaaacaaaagttacactagggaaaagttataaaggtaactgattgagcaagagtctagaaaagggaggggtagtcagaatagaacagaactagatgttctagttatattacaacagaaaaacctttccagtgaaaacaactggagttaaaatagttaaccctttgctgacaatgagaagccctttattattgcctctttctcggtttcattaaacaaagaaagctccacactgttagattaattttggccaaatgatttcagagccaaagacaaacaacatttaaaagtccctgacattgaaatatgattaaaatgtgagaccatttctagagaggagttagcacacaaagactccccggaacatgaagggcagtgctgatgtaacttaggctggttttgagttaataccaaaaacttgcttggctagaaaaaaataagcagtctcatttcaacttggccacttactaactctgtatccttgagaaattgcacatctaaagcttcagttatttaagccatagagcacagatcactcactgatgagtgataatcagaccacagatgcttaacaacgaagtgagaacaaaaatgggaaaactgtgagatatgaagcactgtaccatgtaaaatattattgctgatgagccaagattctggtctatttgaggcaagtgttaaatccaagaagaaagccagggaacaccaatttcaagataagtcctactatgacagaaataatccagtggtggacccctaaaatttccctcttagctctctgagtacatagtaggaaatcacttttagaagtttttagggtgttttctgaaaaatcctcttgattaagctcacagctccaacactttaaattaattgtactcagaagagaattggcatatgagggaacaaaaaacagaagccaacaagaatgtaaagccttgtgctatggttgcctcatacagtgatagtctctaaaaaacaaagtacctcaaagaaaattgtaatgtcttgtttctcatctggcccaagtggttgtgttagtcaagcagagctgtctagtttatttacttatttatttattttttgagatggagtctcattctgtcacccaggctggagtgcagtggcgcaatctcggctcattgcaacctctgcctcccaggttccagcgattc

SEQ ID NO: 70732 - DNA, 2601 bp, Homo sapiens
tgcctacttgcttcgatttgggttaagcgcctcagcttgaaaaaccccacagagaaccaacaattgcctggtctcccccaagtgacggttctcgccccgccccgtcccgtctcgcctcgccccgcccctccccgctcctccccgcccctccccgctcctccccgcccctccccgctcctccccgcccctccccgcccctccccgcccctccccgcccctccccgccccgccctcaacctagtgagggctggaggctgcgcagacctcgacgggccctacatgacgtcacaaaggggccagaccaagtggggcagcaccctgcgaccctgcgatcctgcctggctcagccgccttcatatatctgcttccttaagtccactcttgcccagatagctttcagttaaaactaaagaatgaaagcactaggttgagagcccacgcggctacacccacgtctactcccccactctcgccaggcaaccgcgccccccgcctgcagtggcatcgtccggccacgcccagtggcagggtttccagcgcgagcctgcaggcaggccgggaaggcggagccaggccggcctagagtcacttctccccgcccctgactgggccgggagcccggggctggtctctaagagtgggtaccgagaacagcctgaccgtggagaagggctgcgggaagcagaacaccgcccccagcgcccagcgtgctccagaaacatgagcacaaacgcctcagcctccttccccggcggcaccggcaccggcaccagtacccgcaccagtaccggcaccggcaccagtacccgcaccagtaccggcaccggcaccagtacccgcaccagtaccggcaccggcaccgagcgcaaggcggagggcccgcccgaagccgggggcacaactgcccaggtcccgaacccggactccagcttggacgacacctcctacagcctgtccgaatggagcgtccgttctgagtggcggtccgtctcggatccgctagccagttcccagtggagcacgtcctcaactgccgaggccgcctcctggagctccagcatacactccccaatcagcactaccggtcttagcgagagtactgactccgactccaagagtggcctccggggtttcagcgcttacaacccgagcagtcggatccccaagtctaccaccagctcgaactcctccgatggggccgtcacagcctccaatcaggacaccggcattccctgggtattagtaacaggacctaccccgcccgtaaactcccccgtagagtcattgcaagggtctgccttctcctcagggttcagcaccccacggggtttggtaaaaggaccgaccctgcccccggattccaacctgacctcagtgtccgactacacttggatatttgtacggggacctcctatacccaatgacctttcgcaagtgtcaatacaagcacctcctacacccagtaacacccccgagtgtcagtacaagggtctgccgcatcctcagtgtccagcttcccctggggtttggtaccaggaccacctctacccaataacatttccccagtgtcgccacaagcacctcctgcaccccataacatccccccagtgtcaaggcaggcgtctacccccacctcagtgcctgacactccgcggggttcaatacaagaacctcctgcacccagtaatcctttccagctgccgacacaaggacattctaaacctaataactctcgccgagtgtcagtacaagggtccgccccgctctcagtgcccagctccccccgggtatcagctgaaacatcagctccgcccctgggcgctcccggagtatcagcaaaagggttcgccccgcccacagtgcccggctccccccgggtatcaaaagaaggatcggctccgcccccgggctccccgggggagttgatagaagggtccttcccaccctttgccgtccccactcctgtgcctacgacccaggagcgtgtcagccaaagcatggagaatcaagagaaggcgagtatcgcgggccacatgttcgacgtagtcgtgatcggaggtggcatttcaggtcagtgtggaccgtagcggtggcctgggggaccctggccagtgaggggtaggggaacctacagtagctcttgtggtgtttgggggtctctcatgcatgcgagagtgtagtgtagccatggcttggccccatatcctgcgaggtaggagtgggggttgtgccagttttgctggtggtgtgactgggggaggcagacacaataattttactactactactattaaatactaatatttaattagctcttgctgtgcagttgtatttagcactttacgtggattttctcagtcctcaacagtcctgtgaggtgggaactaaattcatccccgttttgcaaaaccaagaaactgaggtctggggagtttcaataactctcttgaggtcgaatcacctagcttgtaagtggctgaacgattttctcccatttaagacctgcagtactaattcctgaggtggctgctttgcctcactgatttcatatcctttgccctaaacagaacatcaggatacagatttctgtagtattgaggg

SEQ ID NO: 70733 - DNA, 1443 bp, Homo sapiens
ttaaatagaccatgatgaagagtcaaaacattcaggctggacacgaaggcacctacatttgctatattagctctatgataactagagaagtgaaattgacatgttttgaaaagaaagaatttgggagaaaacattggtgaaggaaatggaaggctgtggtggttgagatttcttttagtagttttcaaagattgtttatttaaagtatcattagcccatcgtctattcagtgacttgtgtgaggcatagaatctgtgtaacctctgtgtcacaggggttacagagatgagcctgaaatgctcttcaaagttggttcagaggtccaatgtcagcacagaggagggaggagttaattccacctggaggaagtgacaaggaaaggatttcatggaggaagtcatactcgacagaagtgtcatagattttggataaattctgaaatgtaatgaagatgacctttaaggtgaccgtttccagattaaatgagttagcttggagctgtggcctaagttgaagaccattttcttgcttgtatgtatctgttcattcattcagtaaatatttgtcaattgtgcatcactgtatgccttgagtaaaatttgtggggtttgctctcgcttctctgctttgggcatattgcctcaaaaataaaatgcctcttcgaaaatctgatgaaatctgattgcctcaaaaatgaggcaatatgagttgatatttgactatactttttattgcccttggagtgttcagtccaagagtccaaatgtgcagttatgtaagaattcttttggccagagaccacttcactgaataatagagaattaacaatgtatcatgcagtgtactctgtgcaattcctaggtgatgatgcatatcaaagttgaagaaagatgtcactttcgggaataaagagaaagaactaggcaggtatacaccatagctacactaaaaccttgctccaacatgctcagcttgtgctctgggcattgttcacctaggaccttgcctttgggagtttattatgctatttgaacaatcaatcttatgagagattaaacaagctttcctaaagtgtgttttcaggtatacatttttttaaaaagcagagggtggataaatgctgagttaaatgggtctttttgctgcaggacttctcaggaccatatgccagtgtgcaccaggcatttcccagaaggagaaacagtatatggtgtctcaacttccatgaacattgatacttctccccagagcatctttcttgaggactcatgttccgtaaaacatttagggaactacagcccatcctagtgtgcagagtccaaggacagcaatatggagtgtccctggtgcattttaagtttcaatgaaagattggggcgaataatgaattaaggggtaattgcattccctaacttgggtgagatccttttatctaaagtgaag

SEQ ID NO: 70734 - DNA, 1234 bp, Homo sapiens
gaagcattttatttgagaaaacatttggtttgtttttagttatttttctttcaaagcaattgtaaaagtaggctcttgactttgaagtagtatttgcctttcttttcttgttttcttttttctttttcttttgaaaaaaatctctaaagtctcctggaatcactgcaggatattatgactcagcttgaccttcctccctgtcaccctcagtggccctcacaagctatcctcactcccagaatgggaggctctgggttccctcctaatgcatttgaaggccacaggggtgggggtggcaggtgcctgcaacagacatgtacacacacacacacacacacacacgcacactcccctcccccagctacaggcaatccctgagcaacctagggagcaaccctagagctccaaggaacacaagagtttgaggccacttctttagcctttgaactggttattcatcctcattcttacctggcattatttggaatgcttcatttcctctgtacctggccttcactcttgggaagtctagcttgtttgtgcagtttcctactgtttaaacaagagattgtttaaactctagccactgatttccacagctgttgccagtgtttttctttctcactgaagccaaacatggagtggctggagtctggaaacatgccttgagaaatcaaagttcccatctgacattgcagcctacttcctagagctagtgtcactgaggaaggggtcatttactcattctaatgtcaggattcccacaccaataaccacatcatttctcaacaaatacatcccttcccctactccacctcgggcaataactgtgggtccggaggctacagggctttgggtgtgtcctgggagttgaggatacttgtgacatatgtacactgataaccaatcaggagagaccagaaacctttgtaaactctgatagccacatggtttgagatgcttgggatagtctggtggtgacagatgtgaaaaagcaaatcagtagtctttttattcttttctttttacctttaagctctgttggacttgaaaatcagtagtctttagaaaaactgtgggttcagaggtcaagggaggaatgaagaaagtataaaaaatttcacaaagtatttaggaactctggctacaacaggctgtgatcaaaaaggaaaaacccctttgcttcctcattttctcttttctgcactgcacagtgtttccatggactagtaag

SEQ ID NO: 70735 - DNA, 2908 bp, Homo sapiens
ttatcatcttcaccaattttaggtgtacagttaattcagtagcattaagtacatccacattgttgtgccactgtcgccaccatccatccaacagaacccctctcatcttccttccattcatttctaatagggactaattcactacaggaattgtttctaaccattcattgagaagtaacctagcatcaccctcccactggcagcacagaaagggggttaagtcagacacaaaggatttctctcacactcaggctgagggactttgtgatcacacataatcatgtagtgcctcagtatttgggttaatggccaaaagaactttgtgaatggaattaaacattatatgagcagcttcctcaagagaaattgctctagtctccataataactgaactcctggaggttctgacctttcaggttaaaatgtagttgcctctcagaggttaaaatctcctccttcttccttgctttctacttccttcctatttcttctcagcaacccctgtcctcacctcagtggcatgcacattactccaatcaaaagactcaatcattgatctttaattttcaaacttttgcaaagtagccttctaacagttgaaatcttaaacagcctctaacgtccaatgaatcccatatctagtccattctgggcacttcctgaagaagggaaattcagttgtctcatgatcacatgttgagccagctagaaaaccttttctgtcattgcctcatcctgctgcctaataggatcgatgctgccatgtaaccctctgtatcacgtgcagactcaaacctttttcatttctatgtcaaattcaatgaacagataccttttgaaaacctgctgggccacagagttttagtaagtgacagttattcctactttagagataagagaaagttataataatgagagtggttcaaggtcctacagaagtgagagagaaagagggacaggcataaaagcctagttaattactaacctttgcaaacacagagcttcaaactgaaaagagacaaataatgataataatgtcaatacctgatatttgacagtccagtactattttcataacacttcattttagtttttgctttgtgtttgggttttatgtaaccagaagaagaaaattcttgatggaatcacagaaaacttgagagttaattatagttcagtgtagtgaatgctttgatcctgaaggctgtgaaactgaatcgttttcattcagaaaatttctcatgtcaggtttttcaaacaaaaagaatgattagtaaactattctattacctttcattcccatagctctcctgtaatttgtaagactcaaatgatacacactgaaccttgggctgagatttaattttgtatatttgccaaagtacacagtagcctagtttccatagccatatctagcagataaatgtctctgaaaaaaaaaatcaggcttcagagacaatgggaggaaatcactgtggctcacacttgcggaccagcagtgggtgacaaaagtggaccctgggacacagacatgggtgcagtcactaattgacataattatttgagcatccaccagtcgagtagtcctgagtatctgtgacttttcctaatctgtagattaaaaaaaaaatactattctgatgtttaaatgctgggaagatggtgctaagagtataatggctcttagttcatccaccctttcattccatgccatcaccctatctctgccatcatggttataaagccatcactgaagtaacttcatctagtagtagggggcagggccacatcctcccagacactgtgatacacaaggtggatgcactcacttaacagcttagctgacaagaagttctgctttgccctttgcccctctctacctgctcttatgtactttctcactgcactgtcttgttacgaggaggacgggctaagggcagaaactcagcatgaagcccatgatgcacttgcaattttagctagatatacaagcaatttccttcctttctcctcgttgttgtggaatgatgtgcccttttgtccagaagggatacaaatgacattgtattcccatgtgtaacatttggaaaataaacattctggttgtcacagcttctatttcatcgcatattttcctgtgttatgtcatacttctgccagtgcaagccagaatgtgaagaatgcctaggggaatatttctcaagtgttttctaagcaacattaatcttaaaaatactttgcaaaaacagggcatttggtggtcagataaactttggaagtgctccatatcctatccctgtctttgatagtcaagatgcccattaacaaattaggagtcctaggaagcctggcaataaaaaaagactattgaacacaaaccaggatttcccagacttatgaccatggaaactattttcatataacacctataaagatcagagtaagagatgctatcacaggaagtgtttttagagatttaggttcacaaattaccaaaactactcgggaataaatagaaaattgaatagacctataataaggaaagagattgaattagtaatttaaaatctcccacagaaacaaacccagacacaaatggctttactggtaaattttaccaaaagtttaaagaagaattaataccaattctttataaactcttccaaaaaaatacaagaggaggaaagatttctcaattcatcctatgaggccagtattatcccgaataacaaaaccaaagacatcacaagaaaactacaaaccaatatccctatatagagatgcaaaaatcttcaagaaaatactagcaaactgaatctagcaatatattaaaaggtttatacaccatgactaagtaggatttattccaggaatgaaaggttagtttaatatacaaaaatccaataat

SEQ ID NO: 70736 - DNA, 1199 bp, Homo sapiens
aaagggcatccacggacttttgaggatacaagtcagattttagaaaacagaaggatatgaaggcaatgggggcatcatttgagtgggactgttaaaagaatgcaaagaggatgacaaatgaaaaggacagacgtctccatgtagggtatgaaggctttttctagatagagtgaagctatgtatgtttgaagagagcttggatacctgcatttggaaagaggaagataatgcttttgtaaactattaatacaacacaaaactaccatcctatttaatgggtctcttcttagatgattttaaaatttaaagcattgttataaactatagaaaagaaatcatcaaaagattcatcttacaggctttgtcacaaaacaatgggactagaagggtctcaaggtattcatataagctgtacaggcatgtttctaaattaatctggaagataactcttttattttccagatgattaaagaaggctatttggcagcttccccagtgacttatgatactctaataacactcacttccttttgcttaactcaaatataaaagtacagagagatcaaactctccaacgtgccaatcaggaaatgctattttgcttactataaacttagcttatcttataggaccaacaataaagaattatgtgggagccataaactgccatctcctggcaatagtctcctgttattgtgaacattagtagattgaagatgtagtttctcaaagtcacttaagtgttttggggcacggttccagggacattgcgttctgcttgacataaacaatttctgctgtatcaaagacactgccctttagagattaaaggccactttggaaaactagtaagctttcagagtgtaggtacaaaatgaacttgaccattacactagatttttctcctttaattttaaagagcagtaatcatttggaagtattcccagagcccctgcttcaccctcttaggtcatgaaggcattccttactgagaagtggcttagtattgagaaactgctgacaccttggtgagaatactatagaaccacattttggagactgagagggtccacactgtcaggcagttctcactcagccaaaagacatcttccaggcccccctactgcactactttagggattcacacatgcaaaagtgttccccacatatgtgcatttctttttagcaggtttgggttt

SEQ ID NO: 70737 - DNA, 501 bp, Homo sapiens
agaatcctaattccccagactctgagattctctgcttcaaccctttctgttatccaaagagaatgggtatctctgttctataaatgttgtgcttggatggtatgaggtttaattagtagcagtttacttctaacttaggttctctgagttcctgaattctgagtgcacagtacaaggtatagagtctttctctgccaagtgaattattcttctcctgaggagatcaccggaaatccccaagttcttgtgacaccaagactcattgcccatttgacccttagccttgacaaatgcaggacagttgcattttttaaatgtctttacctacaggcagagatgacagattactccttttagccagtattttactttctgaggtattttgatttacatttgatatttgtttccttcattcagaggagccaggatacttctagccaaattctacatgaccttttggaaaatatggttcagatgattaatctcaaaccatggtcacaa

SEQ ID NO: 70738 - DNA, 1494 bp, Homo sapiens
cataaggagtaggtgacaaagccagtttaactgcagcatctgtattcacagccattatacaacactgtcttccccggacccccatggccatcctcttcattgattgcatcttccaatttttgctacaaagagaaattacacttcaaaagatatttctcacttttttggatcagcttgtttttaagacacacttatatgttgtggtttataagaatccatataacataaaatatgagcccacattaaaaaccataatgaaaagccaaggctttagtcaccgtctatcagtgatcttaaaggaggaattcccattttatagagaggctgatttgacatttcattatttgagttaatccatcttcccatccctgtcaccgggggcagagccaatgcttccagttgctgatgggataacagttccaaagtccatgaaccccatgcagtgcacacaagcattgcacaaccctgatttaggaatacagggcacaggatttataaccccagtttcctaattttacctccataaggaaaaagaaccacttctatttaaattcaaaattgcaaacaattcaatgacatttttcttaccaagcatcaattcaacaaatgaaataacatgcagccatagtaacagctattatcactgaatttagataaaccgcttgagcatgctgaggcttaaacaaaagagttcagaaggaaatacatcgttacttgtatacactagcattttatattccacaaaaggtaccgtcttttagtaaatgcatttacccaataatatctgatgttaaatataaacagttattaaaacaaacaaaagacttatcaaatcattgaacggagttctctatgctcatgtaccttaaacaattataaacagaaaattacaaaaatatctttaaaaagggcaacacaaaaatatgttgctggaagtaacttacaatttagctcactaatgttcatagggggtagtcaagaggcttgttggaaatcaattgacagaaattgatctgaaaaaaaaattggtccaaatatcagtggcttagggaagtcactgcaatttagaaggagggaattttagggtacataggaaactgagttggagtctggtcaagaggtgattaagattgtctagaagaggtagctcaaaaacctccctcaatgatgactgataaaaggactaatagtttgactgctcaaggactaagcaaacaatgaactctacagagcatccctcacctaaagacagttatttcccaagagttcttttctatgttggttgtttggaacttttaatacattttgccatagaaacaaaaatatgagagatggtatatcctctgggaagtatgaaaatttttgagtgcaatactattgcaaaaaaaaatcatacagtagcagaaatacatttgccttaaaacattagacaatgtaatcgccactgtttaaacacttatgcaataatctcctgatataatgcaattaacaatt

SEQ ID NO: 70739 - DNA, 959 bp, Homo sapiens
ccgagatcgcaccactgcactccagcctgggcgacagagcgagagtccgtctcaaaaaaaaaaaaaaaaaaaaaagaaaagaaaacgatgaaatgagaaggaaaaggacagggaaagttcccctgttttttttctggccatgcagtctggcaggatcacccaggaaaaggtacaccaaagataggcccgggggcaatgccctcagctagagcaaggaggaagggaaagtgtgctgccacctctgaggagctggaagatggccagatgagtaaatttgggtagcatggtgttgtgaaatgaattgagtatgcctcaaaattcatatgttgaagttccaaccccctaggacctcagaatgtgaccttatatggagatagtctttacagaggtaatcaagttaaaatgaggtcagtattgtgggccctagaccaacctcactggtgtccttgtaaaaggaggaaatttggaaacagagacatgcacatagggagaactccatgaaaaaatgaaggcagagatagagtgatgcctctataagccaagaggcactaaagatcgccagcaaaccaccagacactaagggagaggcatggcacagattctccctcacatccctagaaggaaccaactctgcaaacactttgatcttgggcttccagcctccagaaccatatgacaatacatttctgttgtcataagccacccagggtgtggaattttgtcacagcagccctagccaactaatatacatgggaaatgttatcttctgtactaactaacttcattgttaattaaacttatttgggcttatttggggataacatggtgatgaaaaccctgggtagccactccagaatggtttttcttatgttgtcagtagtgctgagaagttgggagagggtaagagagcagagagggagttcctagcagaagcactatttcgagtgacctgttggaac

SEQ ID NO: 70740 - DNA, 1900 bp, Homo sapiens
actacagccacattgtttttctttctgttccttgaaaatgcaagggttgttcccaccataggggatttacagtaactgttcccacattctgtaatgctcacctccctgatagttacatgttcaggatcgcagatctcagtttgaatgttctctctaaggaagaggtatttcctgactctgcttcattactgcatcctattttacttttcatcgattaacttatcactagcagtactttgtaggtagctaagtatttattttgttggtccatttggtaatttattatgtgactgcccctccaccaactagacaataagctctgtgaaagcagagatcttgcgtgtgttatttcctgctttatccctagcacccgggagaatatctggcatgtagccatcctcaacaaatatttgttgctggcaggaaagaattcagacgagtcaattaattcacctcagaaggatgaagagcaactcattttgcaaagaactaacgctagtgcggccatcagaatgcattcctcctcaaaacctgatgtatcaaaaacgtattttaatgtcaaggtgaccgtttgatcacagttatcctccaaaatttttagtcccaaattttctgttccaaatgtttctttaactacaaatttaatacaaaattttgtcaaggaaaaaatttaaagtaccagtgcagaagggtagttttccacctggacaaggattcaaaacagacccccaaatatcaatagcataatgttagctccatagcttatctgcctcatgtctaaaatctacagtctcctttcatcagtaacaccattttgggcacttgtcagaaaactaaaatgcttcccctgctgaatgtcatgtaagcacctgaaattttaaagagttattttaagggctttgttaattattaattcctctggggtatttaaattctaggcctgcactgttagattattgaaaagaaagatacctattcaatgctgtactagctacttacagaaatttcttacattttaaatgtattttagcattatgctccagctgaaacgtgtgtgtgtgtgtgtgtgtgtgtgtgtgtctatttttaagtactttgaacaaactctctgtactctcaagctgtgggcatggtccaaaattgtcaaatgagtcagcaacccaagttgaaaggtaaagcctcctgtaacaggaacggccaattccgtcatgttgaagagaggtataatccagacctgagaaacccgtgctacttttcaaattcctcctgaacaaagaagtaaatcctttgccaactcaaaatggcaatgtcaccccttacacccacagttgcaaaattacaacattttatatgtctttagtgacaaaattctaaacccagaaaattatgcaatgatattatgttcttctgtgcttctttgtccctctggatttgtgtttgattctatgagtctttatttcctttaccctgtattgtatttttgtggggttctccatgtaaattcttagtgctatgtcttactatgtccctctgttatctcatgcttccccaattccttgtctctcttaactgacccaaattcaaagccaataaacatttatttattttcacatttgttaactcagctgaaaatatagagatttgggagtcatcttaggaaaagtgagttttgaatccactgagtttcactaaaggcttgtgaaagcagtagaattacatcacaaattttacatacactaataccacacagaaaatatgttcaaggaagtctacttattggattaggccactttaattgcagtatcaggactcaccctgtggctattggccatacacctgggtgtgaaatctgtacactggaagtagttgggacactcactgaatacatgcaccggaaggg

SEQ ID NO: 70741 - DNA, 3919 bp, Homo sapiens
tttttagtttttattttggggattgaacaagaactattccagaattgcaaaagatagtttccatggttccacccacccaaacactaaaactgagagacgcgggacagatgcaacgtgctgctgtccagttccatgtgggagatgtcattgctctgccaagtctctggagatgatctgccccttgggtaaaagagatttcagtgcatactcatttatacaccatacacatttctaaaaagttagtctacaactatcttggaacttttaaaacatcaaaaaagaaagttatgtattaaccagctatcctcccagtatgtctctgtttatcccaaagggagtgattaaaatttgctgacagctttaaaaattatcagggaattgccagaatgtcccaagtttaataattaacaaagcttagaacgcagagtcaaatccagagacttttaaacataaatcattgtgttggtcacctactaattcgaaaattctacacactacactcttgattttggccatttcatctactaaaacctctatcgtacacatttgtaaccccaatttcattccaactgctagatttctctccctgggtgtcctcccagaacctccaactctagacgtcctatcttttcccaaaaccttctctccctcttcttcatatccctctttttgctaatatcaccatcagatgtgacacacgccatttgatgcatggcactctgaataaaaaatcatcagtgctattcattgatcacagaaagagctaaacctttctgatatacaagcctccccataattcatcccaactgacttttctagctttctctcccaccagacccctctggcaactctccgcaatgaagttcttaagttatcctacacgttagcatgttctttcacatatttgtggttttatacaagctgctctttagtttaaaaatgctttcttcatctagtcccctggtgaattcatattcattcctgaagacatagttcagatgtcaccaactctgtgagttcttagattttctcagacagagtttgatgttctctccaatcaccttccctagaattttttatatgcactattaaagcacctatcatatgccaaagagtagtaattattcttgactgtcttccacatcagcttgtgagggccccaggaacaatggccctgtataaatcatcttttatttcttttgggacaaaatgtggaacaggaagtaaatgttcattgaatgaatgaataatgaatcaatgaatggacccctcccatggcacgcaccaccttctaccttgtattgtctgagtatcccatcacccttcttgaattgacaagtcttccggggcaagaacaacatgatccatttttgaatcccctacacagcctccctcaattcctattgtctgaataaatgggtaaaactcttgaggggcttgtgccatatttcagactctgcaaagctattttactcacattgtttcacttgccctgtaatccagcagtgactaactggtgttatccccatgtagcagatgaagcaattgagtaagactgggccttggaaggctgctttcttggttcttagaacaatgcctattccgtggaatgttcttgagaaaagtcagatctactcatcagtaccttgttttgatcagagttcgggaggatgaatgcagaggtttcaccactgcttgcaaaaatagttaaacccttatctaccttttccagatgagtctaacatgagtaatgtgattgaacctgaaggtgtggagtatgaatcagaaagggacaaatcatgaagggaaaatagaaaaatctgaatccattgggcatactttagtgagaaaatgacttcgggggcctgaaaagagaaacttcagcttctgtaagatggggtgctatgcaaggcagcatcaagaggcacttagtaatattttctaaaacacctaagtaggtatgcttttaagtccaacttcctctaggagagaagatgtcaaaaatactgaaagaaaactgaatttatacacagccttggccaacctcagcatgttgtgattacgcatctatgtacctgcaacaccaggcacagggcctggcatgggcgagctcaccagagcctgctagacagatgtggtagcctgagatcccacccaaaggggagaaaggctggagcagaggcaggaggactggaccatggtcagcaccaaacatccaatgccttggttttttctccagccacaggagagtcagaacaactctgtcctgccctcctggcagggagcaaggccaacctctacttcccaaaggccacttgagaactccttaaggcaagtcttagacaatgcatccacgggtctggaggtgtcctaattactgctcaagtactaggcagcgttaggaggtgggccaaagcatgcccagggggccattaaacaggctgtgctgagagcatcattgattcccattgaccctatcccataggatctgcctgatcctccacagagggtaagttccaccactacccccatcccttcttctggcttctatttttcggtgcccttggtatgtacacagccccgtgtggctgagggggtagtgtctgtccccatccttgccaaatatgggctaggccagagagcaaagctgcagcttggccaccctgcgctaggagtggggtggggtggagtgggggtgcgagaggcataagaggaaaacaggcatttgccaaaaagacactgcagcctcaagttagatccgtgacaatcacagaacctcaaagaatcaggagggcctggaaagtctttggcaatcgattggccaggctccaacctcttctgttcaaggtcgttttcctgacgccaggacaacaatacgatgtggtgcatgcttgctctaagcgagggtgcggagtgtccaggtcaagttggagcaaatgactgacctttgtgccacctccccaccccttttccctggcttcgaaaattccagcaagcgaaggcctagcagccttctgggggagaagttcaaagtctggccccagagctgcaacaggcttccagcctctggcctctgcgtccgggaacgcacccaaaattgcccccaaaggagggttcagtgcacggcgctctggacccactagagccctgcccgtgcgtggacagtctggggactccagggtcagcccctgccccacggccgccccccgcgtctcccccaggcagccacctgtccgagcgcgtgaagaggaaggagggcgcacagccgcgactaacctgagatgccgccccccaccacgaccacgtcgcatttgttgctcatggcgctcgccccgttccaggcctccctggtgcccgctgctccgttttctgggcctcgatcccagtcctgcgtgccagccagcccgcccgcctgcccgccggcctgctgcgcgctgcccccgtgcaccagcgcctcggcgagccgctatattaccagccccgggagcccggacgcgcagccccgcccgcccgcctacgcgcaggcaggccgggtgcagcgcagggccaccgcccccgcccgcagctctgcagcccaggcccggggagggcgggtgcctgggcggagaggtcacctaggacttcaaagagtcccgccccagaatccccactcctcagccttctgcacggtattttcccatcagcctccctagtgcactatcaggcttggcggctgggaggacggcaaattggggtgtcttccttcagggccccaattactccttgggtgtagggcaaataataagaaacttccattgagtgatttcaaggtaccaggcactgtgctcagtactttatgcatgattcctgttcaagcttacaacaatccattttgcagatgaggaaaacaaaacatggtgagtgacaacataagataaaa

SEQ ID NO: 70742 - DNA, 1406 bp, Homo sapiens
taaggaccagtcattgaatttatatcatggttaaatataaaaagactaccatttctgtttttagaatctttcattgcgattgtaacagccatgtcagaagagcctattttactcttaagactcctaaatttatgtccagcattttccagagtcactctgaagataagatgacataaatattgtaatgtttgtcacacattctcttttcagagaatcagggtggcattctaaagaggtagtttttgagaaaaccaggcacacgcatatggaaccatttaagtcatttgttgtgacagtaataagaaattgagtaagctatatttcaacaaagaaaacttctgtaggagggaagtcaagaactctaaaagacattgtgttaggatcaaatccactcacagctcagttcttcacaaaaaccttagcttgatttttcagcaaactagtccttggatgtagtggaatatactgtgtgagttataggaagagaatttttcctagaactattcaaacatgcagtcaaaggcagaagaatgcttgtataatttcaaagcaggcttgagtaaacaacacctgaaatagatagctattgtgatctgccgctttctcttcccctcttctagaaacagctcaccacattttatataaactgtcccctctaccactccacttaactgctcacagtgtggtaaccagtcatacttgtgcccatgtgacccatatgaccccatagaattcattctgtttttacatggaacttgacaggatcaatctctctcagacagcagaactgtgactcaacctggtctcagccacgatcatatctcccttgaatgattgcaataggtacctaactggtctccctacttccacccttgcctctctacagttcactctcaacacagaagccagaggtgaacgcaaatcagataatgtcacttctccatgcaaaaccctctagtagttgcctaactcatactctaagtcaaggtcaaagtctttgctatgactcacagaactctacagaatctgccccgcattctcttacctccctggcctcatgtctttgctcactcctatttagccttagacctgttgctgttcctcacacacaccaagtacatgcctacctcacgtcctttgcacttgctgttctccctgacttcagtcctttgtcctcagttatttgcatggcttactccctctcttctttcaggtctttgctcaaatgtcatcttcctagaaaggcccaccatgactactcaatttaaattgcaactccccaccccagcgctttctatccctcctctatgcttaattttttttttctttttgtttttgttttggttttgagacagggtctcactccgacacccaggttggagtgcagtggtgcaatcatggctcac

SEQ ID NO: 70743 - DNA, 1793 bp, Homo sapiens
ttttctaccataggtcccgaactgtggccaaacactcgattccaccactggtgtcttcttgcatactcagttaaatccaacacttcataagagtcgtcatcactttcatagtcttcaaaatagcaaaatgcaaaaaataaatgtagagtcaatcaaaagtcagaaatgttctatacatctttttaaaaatctgttacaactcattagttctggcctacagctaaaaatgcccacatagaaactactgactttatttaactcaattcttgagaccagggcctcaagagtaaaggaccctgcaacaatgacccccatctgctttcccaaaggcccggggaccagcctggggtcacgaagccagggccaactcagaatgacacagtagtgaggggtcacccccacctccaaaccttagtagggtcaaggtcagagcagggtccattttcatcagtgggaggaatgggggtggggaggggtcctcctgagagaactagtctggagctcagcgaaatcacttgagtccagacgtttaaaaaaagaaaataatacatttgaagatgggagatgaagggccggaggtgaaggtaaggcaggaggcaggtagggctgtgctgggggtgggggtggctctccgcttgagttccgcagagaggggaggaaaaagtctagctcggagggggtgctcgaaggggctgccttaaaaaaaaaatggagctcgaagaatcctagggcaggggaaggaagaggtgccataggagcaaggtcgagagctgtgagccgcgtcccagataccacttcgggccctggccgctcaccttggggaggggggttccgggtcgccatgataccgccagcggccaattctggagtggtccccacccgccctcctctccctggcactttaagggccgctctaggccaggatggaagtctatggtctcttttttcctccttctcctactccaggcgcgtagtcctgtctccgcccccttctctcagcgcaggaccttctgccttctgcgcaggcgcgaaactccggaatgtggggagggccgggcggatcatagccccgcgagagcgtaggggacttgtagtccgttgccttccgcaactaggaagggggagggaccgcccctcctagaatttccgtaacttgaatttgattattttgttttaaaagagccttaagggctgaaggaatggggtgaagggcgccacatggtggtacaaagggagaaccagctgggtattgacaaagactctctccttgaccaaactttagtcaggaggctcctctgagctgtttttgactgggtctcctccttgggtcgtctttgacctgcctagtccatttgtggtaagaatgcagttaagtcagtttagtaagaactcccccacccttaatatcgaatcaccctcaatatccgatcgaattcctcaaccccactcttgatatctgatcactctgccaccagcaaaaatcctgttaaattggctttagcaagaatacccctacccttcatgtctactcttggtaatcttccacccattgatccattcactctgatcatttactataaattccctgctgtattcagagttgagacccatcactcacccctattgccatagtctttgttttatgagaaaaggtattgctctgtcaccaggctggagtgcagtggcgctatcatggctcactgcagcctcaaactcctgggcccaagagatcggcccacctcagcctccagagtacccaggactccaggcgtgcatcaccactcccggctaat

SEQ ID NO: 70744 - DNA, 3861 bp, Homo sapiens
aaataccagcaaaatgtctatctgtgcttgtgcaagtgtgtgtgtatgtgtgtgtgtgtgtgtgtgtgtatgagagagtgtgcgagcgagttactggggtcaaaatttccttggctttaaatgtcaccatttgtgacaaagttaacaatgtattaatttagccgtagaaaagatttggccctttgtacacactcattcaagcaaaatggagtatcataaagggaaaggtgtttcagaggaagtaattaaacatgaactataatctatacaaaactacagtttgttcgtctagttactagtctcaggggaacaatttaaaactgtgtgcaaaatcagttgggattcccatagcttcccgctgaatactggtaggaattactgggtcagcactgaattgtcttcgtcatattttgaaatccaagtttaaatatataatttttattggttacaggtggaaaacctattgaaaatataaaaaactccgtttataaacagaatcttgtccttatatgtctatcaattttttcctatccctgttataagacatacagcttagtaaataaatttgccttttgagaagagtagtcgaaaggcctatttttttttcacctatagtaaagattaaaagtcagactaaagcctttcccctgcacctgagagacagaacaacaaaatgttactgttgtctaggggttacaaacctgcaggttttgggggatagaaaggatttcttgggccaccagctgtgatgatttaattatgtcttctctcaggtctgtccacaagcagcccctacttttgtaagaaggctccactgaaatcatggcaatagaacccaacattctgcagatcccgcttcacaatttctcattgctttttcttgtaagactgtaatgaactactgataagacacagggtaaacacagcacgaaaatctggccccaaagtgccgccaacagacagacctttggcggtggggagccatggtcggcaagccaggccccgcgggcgactcttcattccctccggcctggggcgtatgggcgggggtcaggggagcccttcccccttcactttcggcgcgggtgaggtgatcggggctgccagcgcaggtctggcctagggcggcacccggaccgcggggcacgggaccggcagccgctccccgagcgccctcctcgcggaggccattatttccagcagtgccaaaagtctgagccttcttcggagggcagaggtcgagggccgtgcgccgcctcccggctacgcgacctgtaccaggccctgtggggtcccgggacccctggagcgcgcgcgggacggccggagccgcggtctgggcacatcccagagctcgcgggcaggcaaatgccgtccttggcgtcttcgcccgccgctcgcgcccgccgcgggcggtgccggacctcgcccttccccaccactcccctccccctccagagcccgccgcggttcccgaggtgacacggcccggaccctccattctctgccccagtgtatttaaccagcacaacctaacaggaagctccctctcggtgacaacccttcccccgacagacgcgcccagcagccaaccaccggctagaattggcctgcgtcccgctcccatctcggtggcggcctcggtgggcggggctcgggcagctagcaagttaagtggagccacggctgacgtgagtcaacaaaggtcacgtgaggcgtgcgggccgcgccgattggtggcgccagccgggcggggagggggggtcacggcggcggcgtggggttcgctgtgtgacacaattacaacaactttgtgctggtgccggggaagtttgtgtctccaacgaatcccctcagtgctccccagccccgcgcgctccggccgttcccgccgtccccgcctgtggctgccccctgcccaaccccgcgatgtgaccctacagccgaaagccgccgctgccgacccgggggctccgcagcccctgccgccgccgccgccgccttcaccgccgccgcgttgggatttttcgtcgccgccgcccgcggcggaggaggaggcggcgataaagttggtgtgctggtcccgcgcgcagattgggggcgtcactgcgggccccggtccgagggggggtgtcggcgttggagttgtgaattcgctgcgtttccatgaaatcctgcggagtgtcgctcgctaccgccgccgctgccgccgccgctttcggtgatgaggaaaagaaaatggcggcgggaaaagcgagcggcgagagcgaggaggcgtcccccagcctgacagccgaggagagggaggcgctcggcggactggacaggtacgggccgccgtcactcgcccggtcggctccggacgggcagtagccgctctcccgggaggaccgagcgcggcttgtctctggcggcggcggggcgggcacctcggtttggcgctcttcgcgccgcctccgctggggcctcgggctcgggcagggacgggtcggtggcgttccctgagcgttaacgagtaaactgtgtctgtctccacagccgcctctttgggttcgtgagatttcatgaagatggcgccaggacgaaggccctactgggcaaggtaaggcagctgcgagtcggagcgcggacaccgtctccctggccggcgccgcgctcgccccgggccccgcggccgggtctgtgctcattgtggccacggacgatggtcgaggggcttccggaaactatttcctgcctctgctctccccccacccccgggtaccctgcttgctcccttgcgaaatcgctcttttcctcttgtagctggaggaacagagacgggatcgctttggggccgggctcaactgggtcgacacaactgcctgctattttacagctttttgagggtaggccgatgatcttcgaggtgcctgtttagggtcaagggatcgtgagtgtgttcagattttcccaaatttcggacttaacttgcctctacgggtttaaaaaaattcttttccttcaagcaggctgttcgtgatgcctactgctaaccaaatgttttaggctttcttgtgtccccgctcccagaagggggaagtttcacggagtttaggtcggtgaagagtttgcattgggctgttgacatgtatctcgattgcagtgtgtgttacctgaagttaggtgacttgtttactttttgggtctttttggcatagaaataccgtagttatttgtaaacgtgttctcttcctggagcctcatttcctgtgtgtctgacaggggaggctggggaggattcggggtgtagtctttttttatttgtgtggaaagttgttggcactgtcatttagttaagtaatggctgctcctatcggcccaagatggcgggacagggtgggaggagaaagtgaaggggggggttagggggagggtgtagaggtaaacatggaaataaatagtagccgtgaataagcctttccttcggagtgtgtagctcagtggtgtttaaaaaaaattacccaagattatttgcatatagaattcttatacctttcataagcttggaagcagcatgcataagcctggtaaatgcttatcaacctgtagcacatttagttatccatctgtaagctattgaacaaaggctggagtctcaatctgtatgcatcagtttatatttcctgaccaaaatctgattgcaatggtatttgaatactttcttcgtaattgggaccgtgaaagttggagtgtgtgctatgggtgttgtatccgttagacattttcttttctagctgaaatcatagctttgcatttgacacctagctttattgttgcagttgagacgcaagtttgaaataagtctaacattttattctt

SEQ ID NO: 70745 - DNA, 1643 bp, Homo sapiens
tacttggtgaacaagaataggatatgttagaatgatgtctcatatatgttaatgcagaagttttttatgtctcagataagttttttaggtagataaaggaaatgaaggaaatgattccaggaagagcactgtgtcaggagtgaatcataagaaagatgttactattaggttgtggattctaggtattctttgggatgtttctttttcatatgttccctgaccctatccctagactttgccacttaccagctgtgagactgtggataggctaaactactcatcaaagtaccagtttttgtaagttatttacttttggaaaagaaccagatgtaattcaaagttttctctgtaataccacccttcttatttacatctagtatactttcttgagtggttggacaaagtgggtggcattagcaaagctagcttggaactgagcataatactggatactcttgtgagagtatgtctgaagtgagagcattctgtggccaaaaagtcatacagccactgtcttacactattttcttgggttaatttttgacccatagtggtaaacctagttatgagtctgtcctgctacatttacattctgtgttgatagaaacatttggagctggctaggcttttctagaatctagacaactgctttagtcagttgtacattgtggatgtttcctaagcattgaccctagctccaaggtttttttcttgccattagtcatctgcttagtatgaaaattctgtgagcggtgataatacggtgaatatgtagaaaaatggctatttattttaaccttttttaatgttgctggtcataagtttatgttgctacttctttttaaatgaacaagaacagaaagggcacaaactttagttttggaaaatgtaggtattgtagctaaaaatgacatccctctgttccaatgctggaaaaagtgacatttctccttttctgagacctagcccaatttattgcttgtgttcatcaccctctggtattgtacaccagtggctggccttggatctgtattctccctgttggagataagaaatatctgctgtcatgaaaaaaccttttatcgtagaagagcggtatagctaatctgctttgtaatagagtagtgtacgctcttatccacggtttcactttgtgtggtttcagttgacctgtggttaactgcagtcagaaaatattaaatggaaagttccagaaactcctaagttttagattgcacccttttccgagtagcatgatgaaatctcgcactgtcctgcctaggaggtgaattatccctttgtccagcttatctacactgtttacactgcccactgttagtccacttagtagccgtctgagttatcagattgaccgtggtggtatcaaagtgcttgtgttcaagtaacccttatttgacttgataatgaccccaaaacacaagagaagtgatgctgtcaatttggatatgacaaagataagccatgaagtgcttccttttaatgaacaggagaaagtacttaataaggaaagaaaaaaatcatatactgaagttcatcacaagaagaacggtgagtacagtgcaatacaatatttagagagaaagaccacattgacataacttttatcgtaatttattgttata

SEQ ID NO: 70746 - DNA, 457 bp, Homo sapiens
ctagagcagaggtccacagactttttcttacagggcaaaatagtaaatattttaggttttgtgtaccaagaggcaagatcaggtaatatataggtgcttagataatcttttatataaaaatcatttttagctcccaggccttaaaaaaaggatttggctggcaatagtttatagaccactgtcttagagcctgtcatgattgttgggcgttataggactcaaactggggaaaaggaaggcaaaggccagatcataaatgcgtttgcaacagttagcactgttttgcaatcttagatttgtccatatcttgtgaaatacgatagtgctggagatcagataaagttaaataaaacacagttattttttaggggttggattgggattgcattgactttgtattttaaaaacaaactgtcgctgggcacagtgtctcatgcctgtaatcccagcactttgg

SEQ ID NO: 70747 - DNA, 2335 bp, Homo sapiens
cattataattagtgtataatgagcagtgaggacgaccagaggtcacttttgttgccatcttggttttggtggcttttggctggcttctttactgcaacctgtttttatcagcaaggtctttgtgacctgtatcttgtgccaacctccagtctcatcctgtgactaagaatgcctaacctcctgggaatgcagctcagtaggtcacagtcttacgttacccagcccctattcaagatggagttcttctggttcaaatgcctctgacaagctgtttacattttgggctttaaacatcattggttctttttctcaactaatgaattacagaagttgtagtataattaccctagttccttcatacttagggcaagatgactctgagaaatgttccatactgtctcccagagatctccagcaggcttgagtcccagttgcctagagtcataatcagctccataatgcatcctttattggcatactttcctttcctgactcacttctttacttcattaaaggtatttcctcagatacttctcaaataaactacttgtacaaaaacctttatctcacagtctttcttgggagatgcaacgcaggcagcatgacaagcattgtaataatagttaaaattttgaagttttagaaatcagagacatttgtaatttgaagcttataatttcgaagaagaaatttgttcacacagatcagtatgaaagctttaccttcttttttaatagggaagatttactaaaatagatttgcttggttattgataaaacatatactgggtactcaaacatttgctgtttttgaaaataaggagtaggatctgggcatggtgtcacatgcctttagtcccagctacttgggagactgaggtgggaggattgcttgagcccaggagtttgaggctgcagtgagctgtgatcgcgttggggtgacagagcgagaccttgtctctttaaaaaaaaaagaaaaaaaatcatggagttatataaatataaattatataaatagctggatcctattaggagtccagaggtcaaagttagtcaggataagtgttgacacatgtcttgtttcatactgcaaaaggagtcaatgatatttaaagcacaagatgttaatgcctaggtgatgattggcatgatgctatttttcttaaatactaaaatttgttttaggtttatactgtgcatttcctttgaattctaactaccttcctggcagtactaaatataaaattaaatccaattcaagaaacaaaaagaaccagaggaagaatgtagatacaagcaagagagaataggataacataggctgagcattctcttattcctgaagaatagatttttaattttagatttgaccatagaatttctgctagtaaatatttttatttcagggctggaatacctctctaagttgattggaatctgtgccatctgatcactgttattttggtgttttaaaaatatattgtaatgcatgatagaattttaggacttaaaacatcttggataccgtattttacaataataacatcatatatgttagatacaagtatttttcctaaaaatctttttcccttcctttacagaatgctgcctttttatatggtcttggtttggtctacttccattataatgcatttcagtggtaagttgacataaaaccagtaattcagtcattttcagtaaatggcttgtttgcttgttttgtttgtgcttgattttttgtgtgtgtgtgtaataaatagaaaatttagtgtcattaaacctacacttttcagtaatcttttgaaatgattagattgttccttgaagggtgttggctcaccttagatttttagagttgtatgttttcctgaaagaatctagtataagattctgttgaagaaggcttagattagaaagctttttggaatttcttagtcattcattatggactggtgttccccaagttatttgaactggtgaatcactgtgatctcagaagtcaagatatgtgggtaaatggtctatgatggctagttttcagacttctagacaagattgaccacttctcccttccacataccagctagcactttccaatatccagtaactaggcaccaactcataaactctcagttctctgtagaatagtaccacttcagagttggagattaaatataataatagtaatatataagattttctaaactgtaaagtgaagtaccctgtaatattatggcctttgccccattgttgtttttctgtttaccagacaatagtatgcactaatggggtaaaaaggcatatagttttagttgaaagattggtattgttgtcac

SEQ ID NO: 70748 - DNA, 1761 bp, Homo sapiens
atttcagtggtgtccagggatacgttgttagcaatcactcaagaaagcccacagggcaaaagctcttgtaaagcattaggattttacttctcttaaattcttcaggtaatataaatgaggagaaaactctgggaagccccaaaggagggcctcttgtgttactgtaatatacacaaatttaatttaactgcacttcagaattcatttattcattcacttaacaaaaatatattaggcacttactatgtgcctgacactaagcagggtatgaacaacatttaaagtcaaaaaggaatggccttggccttggtcctcaagaagtttatagccctgtgtcttatctgttcactaccatttaaaggcaaccccagaagacaaataaccttcttggacttatttcttaagttgttccacttgttttatcacaggctataaaaagtggtattgtacattgcaattttatcttctttattttatttaaacattacaactactctgtgaagtcaatccagttagtataacatcctccattttaaaagttaggactgagatactatgtaagcccaaagatttaccctgcagtcacagttgagagaagtcaggccctgaacctcacttgagaaaagcctttgctttctccactttaccactgtcttgtacctggcctctgttactattttctcgatgtgttaatcttgttcgtcacctagaagaccttaagctgctaaaggctcagtgtcatatattctttgaactactcaaaacatttaacacaatgttgagcatattgttaatccatatggattgggtgtattgatttagcaaaatttaagttaaactttgagatatgattgagagaactgacaaggtagttcaagctcacctctccaggacctacatatttgaaacagcattggcattgacttcttcctttccaaatgacattcttctggatgggtttaatttactgtgggttaggataattgggagaggatgagaccactacctgggagagttaatggctgaagatattactcatattcttcattggaagttaatgcatgagtaattctcgagtggcttaaccaggccctagatttcactggggagattatgattttaatttaacatatcctgccatacagtgtgtgaaatatgcagccagcagcgatcgctatgagatgaaagcccagttgtgtttattttaagagacttgtggttctttgccaaagccaacattcctgggcagtgaatagactgagtgaatcattcaaagtaggtgagaggtcacaagcctgaaaaaaaaagaagaagaaagctgaaagcttttcctgtcaaatagcaacctttgaaaaggcatttataaagcaaaatctattatggaaataggtcttttcaagatgaatcttctgcctgtaaatcctaaagaattcttctttagctccagataattagccctgttgttgttcacctttcctggaaatcagggcagagaaatactctagttcctatctctggctctggacaatatgccctcattagagaatagaacagtatccatgttcttttttttttttttttttttttgagatggagtctcgctctgtcgcccaggctggagtgcagtggcacgatctcggctcactgcaagctccgcctcccaggttcacgccattctcctgcctcagcctcccgagtagctgggactacaggagcccgccaccacgcccggctaatttttttttttttttgtatttttag

SEQ ID NO: 70749 - DNA, 1743 bp, Homo sapiens
tgatattaattttctatttctatttggctatttttttgttgttggcttcttcagatcaaattggtgaaggaatgaataaattctgcattaagccatgttgcacagcttgaagcgaacacaaaattagatcgtgcattagttcccagttattttatgaatgtaacgtgcctctcgtaatttaagaggagagcatctatcttttctttcttcaatttccttccttcccataacatagcacaaagaaatgttaaatagatattatttggaaactttgtttttgatggaagatagtttggggattcttgcaggcagacagtagaggtcaccatggagctgtgcatgatggagcggcctctcatggacctggtaatttagctggatcggtctgaaattgcatgaggtttaatcattcaattcagatgagtatactttttgctctggtcattcaacagacagcactttgtgatggttgccttcatgtcactttgctaatacagttgtttggaggagagaaagcagcttttatatattgtttattgaaaaaaaaaaatccatcttaagcactaaggaactctgggaaaaatggttacaaaatgtgtttacttaaatattgtgaaacgaggatggaaattcgcagtgcagggtatttgtcatctgctcatgactagcagatggccgcctcctcctcatcctcctttgcgagccgagtgactcacatcttacagggtgtgcaaaatgaaatttcgaaactctccagagtagaggtggcagtgccataactccatgcaggaggagtgtgccagccagattactttgccagccagcatgctgccaaaacttcacaaaatgtctctcattggaaaaaaaaaaatgcgtttggatgtctctccacacatgttcaatccaccatctctgaaaggatacagggtatatttcaggctgtggggaagcctgtgtgggtgaaagggagcaggtggtctgccggcccggagctgggtagtaatcatttctaccaaggtgaatcacagaagatgggctcacctgttttggcttgtcagccccagaatgtttgcaggtctgcctccagccatcaacagagctgtcatatgctctaataaataagagattaaatacagtttaaagagatacaagtcatttacgttcaaagtttttctttttctcttttgtttaattaaaagaaactccagatctgctacaccaaaaaataaaggctgtattacaggcaattgtacttgttttaaaaatagagccctgccagtcaggtggactaacagataacttgatttttagctgcagattctactttccttcatctgatagctagtcaccgaagatttctccctcatctccaccccccaccaatgaactgcacctcccaatatttacccctttgtgtagtatcctccttttgaagtcaaaagaagtctttgagctttcacctgggtctcttggaacacgtgctctggaggaaacccactgccatgtaggaagtctgactaccctgagacctctatgttttgagggagccacatgtcacatgaagagactgcatggagagagaaattcctggcaagcccctaggtgtttcaggctgttgaacaagatgtgactaaagaagccatcttcaacatccagcctagttgagtcttctgatgactccagccgccatctactgcaaccacctgagagaacccaagaactacctagctgagcccagtcaac

SEQ ID NO: 70750 - DNA, 3441 bp, Homo sapiens
aatgttctttttcttattctattcaaccttttcagtatattcttaagaagccaaatcaagaaattagacattcatgcctaaaataaaattgcgttaccttatacatcatgaacaggaacctgttgtatataacacgggtattcaaagctttattgtctttttctagaaccctttaacataaaggcagctcagattcaagattagaaaactgaattcaacaggcaggaacacgcatacgaaaccagtaagaactactaatcacgacctctcaaaatgtcatgaaccatatagatagaaataaccccccttttgctgtactaatgtaatccaatagaacaaacttaaaattcgtgacacaaatgtaagaaacaaaaaacaaaaatctattgccattgtaatctacccttcccaatcaggagaggtgtttccgacgcattacttgaactttcattttgtacaactttcatcttgtaaggttctaactaaatacttgacatcttaatgcagaggaaaggaaaggagggcaagtagactaattctgaaagcatcccttcaaatttcatacatgctattcagactaaatggaaatctacatccatggaaagttaatgtcgcaattctactaaacagcccattctgattttatgtttctcctccactaacaagaaaaaataaaacaaccaaatctagctgtattacatatgtttagctaaactgatagcactcagctcatttttgttaattacctggcttcttctcagtctttatgcggtattctcgtgctgctcttttttagaactcctcactgtttatgtgttctctgttcaacacagttgttaggggtctgtgaacaatttttcaattcccacacacgcatatgatatctattagggagcaatgccacttttcacttaccaattctggataaaggagtatttcctggtgacagaatgctgctgcttccgttcactaaaactccctcttcgcagcttgataaatctgattataaaacgtctttgttccagatcacacgaggcgcttttcctacaaaagttttctaaagagttatctgcatttcattcctgtgacaaaacaaatcagaacaaggggggtgggggggggaacagggaataagtccacacaagttcctggcaaagattttaagctgcatttttctgagtttaatcagtaacctatattaaagtgacagttaccagttcaggaagcctagagtttgatcaagtcggtcacaaccactttgagagtcttccactggtgtgcggactccaagaaagcagtcacttggtcatctatcacatgtggctgaatcactggacagaccacccccgccccacacacccccagcccccgttgagcagcagcccaggcaggagagtggccggacgcccgacccaagacctcttatagggacccgccaattagctgctgaccaatcgcagccagcacctagtacctaagtcacatgatagggcagtccctatgactgcaggatttctgaattactggggttacacaaaggacactcattcaggaaaagagaaaaaaagccataagccgaaacagaaaacgcccaggctgcgacaactacggctttaaaacagggaacaccccagcctcacacagacagagaaagagccacaaccaagccaggatgaaaatcagaagaatgtctggcacatattaaaaaataatcccaaagcagacgctgagtttacaaacccacttcagctataaatctactcctccttccccttcctctatagtctccaataattttacattctaaacttttttattttaaaaagctccagtgagcctctgcaaaaccgctgtaagaaaatgtgcgagacacatgagcctctcttcccatcccctcaaaatacccctgaaggagattcaaattggccatgaaaagattcctaagtgaaatacatttcttttaaaatagttaaataaattaagtgaaattaaacattgccagaacagattcgtatggtaactaacaaatcatctctctctcaatcattttaaactgtacacatcaaggacactcttgttaagtaaacgagcccactttgtgaactagatacccatttatttttatttgaatgcccccaatttgtctcttaaacaccttttatgtttaggaagaaattcaactgcgaacacccctaccattgctccgacctccaaaaatggtacttacaaatgttccttgtttggatctgtcgacttcttctcccctcccccgacatttggagtcaaaatatgggctcaacctcatccttcaaacctaaaggccctattttgatcgtgcaagactgcaacagctccttctcccaggcaagcccagaacactgtgccgcttgccattcccaatttatggaaggaagtgtatgtcaaacaaaccaggtgatgactcagactgcctcctccagccacgttttccctagaatgggagggtagtttaagtgcagcccatttggatgtgactcagttttattagactggtggctgtagctaagctgacaagctcacattttttttaaataacttgtacatttagagatcaggacgcacattccaactggtttcaagaattgaatcatgtaaacaggagagatgcaagattatttttaaggtatggcaacgctctggctctgttccctaatattttaaatttcagaactgtgcactgaaatttttacaatggaggcaaccaaacgttttaattcacacaagagtagcaaacaggttttctacatttaggtttacttgaggtctttaccatgagggacttggactccttccatcctgaagattcaagtctctaagtctggggcccgcgcggcgggttcttcaggaagtggttgggagcatgagagccatgttgcagctttcacttttgcatttactgcaattcacactctaagctgagctagtcacacacagcacacacgtaatacaatcacatcaccaaaaaatctgtacagtcctttagtctcgacctgcctaaaagctgtgaaataaaaacttgaaaaccaccagtgaaaattccaattaaatatactgacatgccctagtagtcttcctcttcagtaaaaacttcactaccaagatgggagtggcattacatggagtaaattgttcccaggtattatgtagacaggaagaatacagtaataagaagggcaattccccacatgaaaaatctggaaggcttgggctgagcaatttaactacagttatctcttttcagcatacttcctttaaccttcagcaaagtcagcaactgctctgactaaggcttggcatttattgttgattatgccttgatggataactagttttattacaatacaggaaatacatccaacatttgaaacacagaaaaatgttcagatgtctaattttcagatt

SEQ ID NO: 70751 - DNA, 790 bp, Homo sapiens
gcccacctgcgcgcagggtcgtcgctgctgccggtgcacccgccgctgttgcagtctccagctgcaggaggaagaggcgcggcggctgagcccccggactccacgcgcctactcgcgccccggagcggtggtcctcatttcccttcgtcccggctggcgagccacccacctcgcccgcaggttctgccagtcccgcggcccgccagagcccaagctatcctctccgcccctttcccgccgccccgcgctgcgctgcgctccgccccctgcccgcccatccccgccggggcccagccgggggctgcgggcgccgcgcctcgtgccgcagatttcgggttcttgggtctgtggcggtagaaaggggatgggggggaccaggggtgcggccctggggtccgcccccaaccccgctctcccaaccggttccccactcctggggcccgcggcggccgcccgcggctaagggtgtgggaaccgtgcactctgcccccgctcttccggcgtctccccgcatggcaccttccgtggcccagagggtgcctcgtgtcttagggggaggggggttggtgaagcaaggtggagtgagcctgagagtggaagcgaagaaattaccatgtgaattgccaggggatgcaagttgctgcctgtgccctgtttcttctacattaactacctggatgtgctgcttcccttgctacaaccgcagtaatattcagaagcttgaatataagatttccaagttaattggctgtagggtggttgggtttttttttttttaatgtaatgatgg

SEQ ID NO: 70752 - DNA, 435 bp, Homo sapiens
tttgacaggggaaatctgcttatttttgttaatccagtagttcaaaattttattttatcaaataactttaatttttacataacacattaatattctgttctggtaggtttgcctagaactacaggtttgggaaatattggtctaggatggcttccagggaactctggcttgcttaatagagtaaagggtggtttcactgactgagtcagcaaatacattagtaagagaagatctgtagaataagataataagtttagtttgcatgttttgaaatccatgaggatatctctaataagcaattgaatagataggcctagagctcaagggtgacagctggggtggaggaacagatttggaaatcactggttaaattcaaagaagttgatcatatttctaagaaaagtatttataagtagaaggagacaaaggcctaag

SEQ ID NO: 70753 - DNA, 550 bp, Homo sapiens
agagtaggagacttgtcagcagagagataccatctatatacagcacagagtcctagacacacagggccatggggaaatagaaattaagagattccaagtgtattgtttaggggagaaaagagcaattcaaataatatctggagtctgtgactggcatcattacaaacacttagactttgcaagaaggcatcaatgtccagaatgacaatttcagagtatgaccaaggaatttcccaagaaagttatggcaaatacccagtgtcaacattcacctcttggtaggggatttccccagagtttagtttcacaggtcacaggcactagacaactcctatagttagtctagtgttttggagaagctgaaacccagaagaatgtttttgcctcatttttccttcagataccactgagtctccattatgtctttggcagtagtaacccaggattagataggttctgagatttcatttggtttgagaaaactgctctagtgctataaattgctggaagtaattaattttagccagtgttgtgataatttgtatttcct

SEQ ID NO: 70754 - DNA, 712 bp, Homo sapiens
tgagaaaacatacttctttaataaactgctatgagtgggagtgggcaggagttggggagagaaacagtggaagtagtgagagcatgataagtgaagcaaagaagaagacgtgtgtgtgtgtgtgtgtgtgtgtgtgtgtgtgtgtgtgtgtgtgtgtgtgtagacctgtacacaaaacctccattatttttatgctttcatttctacacagccagataatgtcaggtaaaagtataacttatgactcagtcagagcaatgcttttgctttgatatatcgatgttggctgagtcaagtaagggtggagatggcaagagaaagataataagtagcaaatatatgtgttcagcggaaagacaaagctctcactttgaagagctgagttcagaggtttcaaagggcacacaggaaatgctccaacagcataaactgggccccaagcgccattccagccaactttcagccctccacatggctttatctgatctcatgattctctgtctccagaaccaaagtacccacaaagaagaatggctttgtgataaaaatcagatcagggcttcgatcacttttatgatcactagagacctggaggtatagagatgagaaggtaaaaggcagacagtcagactatggtgggttcccctgagttatggggaaagttataaattatttactaaggcacacacagtgcctgtttttatgacgaata

SEQ ID NO: 70755 - DNA, 1581 bp, Homo sapiens
catgcctgtaaccccagctacttgggaggccaaggcaagagaattgcttgaacccgggaggcagaggttgcagtgagccgagatcgcgccactgcactccagcctgggtgacagagtgaaacattgtctcaaaaaaaaaaaaaattcagaaagcaaaatttcttgcccctgtaaattcacacttcaatagaaaactattgcctgtagtacgtgctttcaggcgttatctgattctgattctactggagctatttgccactccctaagttgtaggtcactgatagatatgcaaatcctgtcctatctggttcaattgacttccttccccctgtgtgtgtggcggcgggggcggggtggggggcaataaacagtttgcttccatttgcaattcatctctaaattcctttactccacataaattggggctgtttcttttttaaaccagttataacatctgcctggctctctcagttatgtaagtaaaataaagtctttaacacatgttcgtttttatatctgtataacggtcacgattttacctctttctggaaattaccttttaacacccttgtgagatttctttcttaggtagcagcagcaggagacctggtggaggaccttcagtctagagaagaccagtaccaggccatccggtctataggtaaagagcagatgcctcccacagagctgtgctccacagaagaaacaaaggggctcttcgaaagggacatgtcccttctcccacctgcctcccttccaacctcccaaattaacaccaccatctaaaacaagaatttggtcacctttcggaaggcatctttcccgttttagaaggggttacttctggatcctctctcaacttgctggtttcccacgctctcgacttgcagtttcacccagtgggcagggctgggtttctgttagcctggctgcaacctcctgcgccctgccaacacacaatgatcagtggcattcctggaattcctgacatagcagagaagccaggcttggccctgcaaatgcccttgaactgcagttctgaccccagtggggcattttatcttttattcacagccagaggttaggacctatttatgtaaatcctctgccaagggtcgattcatcttgaccccctggttttcatttctctaattgtcccaggtattttttagaccccttggaaactcttcattcagtgaaaaaccttggggtcagtaagaatgcggtaacaaaggaaagggggtgggggcctggaagagttgaggaggcttcctttgaagtgttgtaaagaagctttcagaggccacccagtttacaaagtaaaaacagcaatgacctcatgcaccccattttattcacggaaaataagctttcttgaaatggtgtcttcacctaagaagtttcttagagcatgcattgttcaattttgtttcctaaagcacacattgtccaatctcagtggtggtaaggggttggggaaggagctgtcagaattgcgggcctttgggcaggtggtggctcctcagacaattgttcccacttaatgggcccaggatccctcccagatttgcattttaaaag

SEQ ID NO: 70756 - DNA, 407 bp, Homo sapiens
aactttgtaacaatttgaacagggtgagaagcctcctggccagaacctgggggagggcacaagttcactgtgcagactccacaggcggggaaagaaccaagcccttttcttttccctacctgcagctgggaagcaggtagcctggggcaaggtttcaagcccatctcacccaccaccaggaaacagactgggggctgtttgtgggagcacggtgggagtgagaccggcccttcggtatgtgtgggagctgggtgaggcttgtgactgccggatttcccccacttccctgaaaaccttcatgactcagcagagacagcattatcctcctaggtacacaactccagtgacctgggaatctgacccccatcccccacagcagccacagcaagacccacccaaagagagtc

SEQ ID NO: 70757 - DNA, 1796 bp, Homo sapiens
gtgtctggcaccagttggctccagcacagaagggattgctttgtacctggtggagaccctgccatgcctgacccaaggaagcctgcttggtgactaggcaggcacagaaggatggagaacacacttcgtctgtttcccccaggcccagacaggaaacagaaaactttcctcaaggccattacaggcctttttaggggaccatgttgccactggctggcaatctcacagaaaacacctctttgctatttacagtgcgttttcaaaaaagtaaaatccagattctcccagggtgtctaggatctcaggaattggagcccctctattgcgtagagaaaaatcagaatgagggtttctttcctcatttcaagagatcgctggctctgcagcccagctcaaaagcccatcctccaggccacttccccggctgagccagaccccttgctcccatgactctctgagagccaggcccagggtcgggttccctgagaccagcctggaccctagatggccacgcctccgagcgctattggcgccggaggcgcgactctttttcctattcccaggagggtaaaaaagcgggaacaatggctttcaggacggagggacacaaacacccaatgccgcagcgactgggagggtcgcgatgcaggaggacgaaatgggagaagggggacaagggggacttcggcctccctgcgggcgggagctaggccgctggaaagtccgctcgcctctcgccggcaagggatgacgccctgggccttttgtaccactcgccacggaaaatggtcacacgcttttgtcctcaagccgaacactatcagaaacacggggtccctggaagccgccatcttggccattggcggtggcgcacccacccccgtgctactgcgcgtgcgcggcgctgcgacacactccgaccccatcccgcgttcccagggggcggtgggaagcggaagtgctccgctgacccgggagggcggtccctagttcacactggctgttgtcagcggcctctgaggtttcaggctcttggcggtgaagtaagagggacgcggaggtggtgatggttttgatgggggcgggggttgacggggtcgtggggtcatggggccatgggtgaacgcctttgtgggtgacagggtggctctacagcccagctcaaaagcccatcctccaggccacttccccgcctgagacaggccccttgctctcaggaccctctgagccaggaccagggtccggttccctgagacccgcaggcctgtgggcgtgagtgctggggacgaggttcagggccagcgagtgactgattgagtcactccgcgcctgtttcctgagcgcctaaaaatgccaggcaaccttgcaaatgtttcacattaatcttcacaggagccctgtgaggtgttacgatgattattttcgtgttatagagagaaaatggctcagtgtggcttgacaacctgtccaaagtcacgtaggtagcaaacccgaggaatcttttttttcttttcctgtgcttcgtttatcatgtttattgtttcctgtgtgtctcccccgctggactagaaactctgcgggagctgggactttgagattttgttccctgatgtatttccagcacggagaacgggctcatggaaggaaggcacccatttcttcagtgaataaaagtggcacagcagtcagtcagttgattccaaagcccggactcaggaaggcagggtttcgctcactgaggataattgagctgtgaatcaatgttaactcttaaagctagaatgaggcattgtccc

SEQ ID NO: 70758 - DNA, 1974 bp, Homo sapiens
gcactctgaccctggaaacacaatgaccacaggagattcaattagcaacacctatgctcccttccatgcagtgaagttgagtgaaacccaaaggtttttacccaacagaagagggacaacccctcattctagttttaagagttaacattcatgcacagctcaattatcctcagtgagcgaaaccctgccttcctgagtccgggctttggaatcaactgactggctgctgtgccacttttattcactgaagaaatgattgccttccatgagccggttctccgtgttgcaaatccatcagtgaacaaaatctcaaattcccagctccagatttctagtctggaggaagagacacactggaaacaataaacatgataaacaaagtacaggaaaagaaaaagaaaaaggattcctcgggtttgctacctacgggactttggacaggttgccaagccacactgtaccgttttctctctataacatgaaaataatcatcgtaacacctcacagggctcctgctaatgtgaaacatttgcaagagtgtctggcagttaccaccgggtgaggatacaagcgctgagtgactcaatcaattagtcactcgctggccccgaacctcgcccccaacactcacgcccaccgcctgtgtcactcaatccccacaaggacgctcacccgtggccccatgaccccacggccccgtaaactcccgtcattcctcccgtccccccttcccccgatcaaaaccatcaccacctcaccctcccgcttacttcactgccgacagcctgaaacctcaggggcggatgacaacagccagtgtgaacgaagcgccaccctccgggtcagccgagcatttccgcttcccacagccccctgggaacgtgaagtcaaagcaatgcgcacgcgcagtggctttgaaggcggggcaacaaagcctgtggccgatgtggcgctcctcggcccgcgcttcagtggttatgacagtgttcgctctaaggggagaaggaatgtgtgaccatttccaacggtaagtcgtacaaaaggtccggggaggcgtacctgggcggcgagaggcgagagaactccgcgcgggctttccagtgcccaggcccctgccggctccgaagccgaaatcccttcttccacttcgttctcttgcagtggacgtggggtgttcccacccctctgtccccaaggccactgtttctgtcttccgctcctaggaataggaaaaagagtcgcgcctctggcatctgtggcagctccagagcgcggccctctagggtccaggcaggccacatggagcggggccctaggcctggctcagagcgtcctaagagcaacaggtctggctcagtcggggaagtggcctggaagaggggctttggagccgggcttcagagccagcaacctcccgaagtgagggaagaaagcctcattctgattgttctctacccagtggtggggctccggttcctaggatcttagacaccctgggagaatctggattttactttttagcggagaggtgttttctctgagaatgccagccagtggcaacatggcccgctaaaaaggcctgtagtaaacttgaggaaagttttctgtttcctgtctgggtctgggagaaagagaacaagtgttgttctccatgcttactatgcctgcctggtcaccaagcgggcctctttgggtcaagtatgacagagtctccctcaggtacacagcaaacccttctgtgctagagccagctggtgccagacactgttcatagatgtgtccaagacatttgtgtaatctatcagacacgtatttaatttccatttgaacatgagtgtttttcctctttctctttctcctctcaggttaacttgcattccccagatagtttggatgagttacaacctaaatctgcaaactcaatacagccagaccctgggaagtgactctctccaagcctcctgtacaagtccc

SEQ ID NO: 70759 - DNA, 1842 bp, Homo sapiens
acctctattcacctttcaagcctgtgcagaagcgtggcttctctaagaaatgtttcaaaagcgacatagcactccaagaagtgtaggtgtggatatcacaggctctctcaagagactatctggctcctgactgtgccgctgccattgtcttgctgtgtgatgctgggcaagttacctaacctttctgtgcttcagtatcctcatctgtaaactggaaatattaataattacctacctctaggggcattatgaggctgtaatgttgtgatagaacaagaaatatatatctggtttttgtctgacataaaactcctaaaacccttggaatttcctgagtagatggggtgggaggaacatctttttttattaataataagctcctttcaagcacacctgaatttatgctaataaggtgactcttgaatggacactgattgccagagaaaccaaccatgtaattagaggattggaacttttagccccatcccaacctcctaggaggggaggactggggattgagttaattaccaatggctactaatttaatcaaccatgcctatgtaatgaaacctccataaaaccctaaatgacacaatttggagggcttccaagttggcgccacatactcccatccccatcctttgccctatgcatctcttccattaggctatttccgagttgtatcctttataacaaactggtaatggtaaaagttgtgttctgtgagtcattctagcaaattatcgaacctgaggaggggttgggaacccccccctatagccagtcagtctgaagtacaggtcacgacctgggacttgcaactggtgtctgaagtggggacagtcttgtgggactgagtccttaacctgtgggatctgacgctaactccaggtacgtagtgagttaaactgtaggaggtccagttggtactcattgggaattggagaactggctggtatacaaaaagaccctacatatttggcattaaaagtggtgtgaatgtagagaaaataggttttaattttagaactgtaaaagatttttcatttaaagaacttaggatggtgtctgatatgtggcaagcactcaacaaatattgactcattattgtttgccatgtgactttttgtgctgattaaatatttgtgaaatatttaacccagaatctggcatgtagttagagctcatattactaattaagttcatttccaaagactggatatgtaatttcaagcacatatttgtttgggggaaaaaaacgcctagccattaacatcatttggctatcttgtgtggctttttacacaaggaattttcatctttttactgccattattaatagagaagccccttcaagaaaataccaccaaccctgcttattatcattttttgagcatgtaacaatgagtgtctatttcttctgcattcattaagcacctactatgtgccaggcaccatgctgggtgctggaaacacaaagaggaatgtaacttagcacctgggcctcaaggagcactctttccagaaggtgaaggtggcgagggttggggggtagggggaggggagacagacaaatacatattgactgacaaatataatgaagaaaaagaaagctgattaaagaactggggaatagcaaacagtcctatttttgaaataatttttctagaatgaatgcataatgatatctgtgtagagttacatttcattccattcttatataatattaaaagatgtttttaaaagataaggtcattacactaataagaacagcttactttttttttttttttcagggatggagcatgtggtaggcagaataatggccaccccaccaaagct

SEQ ID NO: 70760 - DNA, 1541 bp, Homo sapiens
agggaggccggtttttcagtttgccttctaacttttgaattttgtactatcatatgtattatcttgtccaacaactacttataaaaggagtgacttttaggactgtattgtaagaatacattcaggactgaatataaagacctggaagctagctgtgcacaaatgatctctaaagccacacatcagagagccaaagttatgtgagcaaggactgccccttaggcacttccacatttaggtaaacagagtgaaagcagggacaagtgggaagacagaaggactgccatgtgacaagaagaaccgcattcagaaatacaactaaatgcatcatggaatgtacctggaatagggaagtggacagtgagggcccccatagatttagaggtaagagaatgaaggttccctcagtgttagccagcaaaattgtcatatgttggatgtaactggcaaattgagggagtaaaccagatgagctgtttgtatgcccttaagagcctgggaatccccaaactgcaatgtgactcacctggaatgcacctgagattcgtttagggaaaacccagtccattctgtggaatctagtttgaaaaaaatactgtgggaaaaaaaagagagagagagagagaagaaaggctgactccaaaagtcagatgatgagatcatgcatgtaaccactgataaaggaaaggatacagtggctgttagtggggagaggtggagtcaaggctattccagcaaggagatggacccatcaggcttttccagtctatttatgagcataccataaccaattgcctctgttcttcctctgtcctttctaagcaactttctgatgacaacctggggtcccctgctacttgcctactcagaaaaaaaatgctctgctcagcctgaacatacattctgctctgcaacagccaaatctcttatcataaattaatcgattggcactctggtttagcctcaggctctctgagcctgattaacgtgagcctgaccccaagagacagtcacccaggctgctgacgatttcagcttttgagccagcaatggcattgtctagagtctgggcaaatggagaaggccccctgttggggcctcttgcagcctgccagcaacacctgtgccacaggccttaccatcaaactgcaatagcatctgttttcccaggtctatttcatagctcactcctgttatgacagccatggctctgtcctccacatttgttttaagggtgagccactattttctcttaatccaatcacttcatatggggtaaaagtcactgttaaaagccaacagaaaaccgcgtggcataaagcaatcacaaagatcacaaacatacagattcttcatcattgaattgactgtcctactctgacatagttgactgagcacgacacacagaaaagagagaatcccttgtggcttagtgtaaagagaggaagtaggctgtatttcctccttccctggtcccattccttcccttctacctcggaggcaactgtcattcattttagtctgtatccagtccaggttta

SEQ ID NO: 70761 - DNA, 1882 bp, Homo sapiens
atacccaagcaaagacactttcagacttcgtccccactccctactgtggcctgtcccctgaggtgatgcagtcacctgggaagccacccacctccagccaccacgcaggcacacacaccctatcgagctcaactggagcgggaggtggtgggtaagaggtttgcaacagagaccgaacggggcagacggaaccggaccacctctgtccctttcattttcctgggttcccaatgcagaaacgtggaataggggtggaattgtttttaacggtagcagagagccagaaaatgcagacagttgaccttgggaaccaacaccgtcgcagcgggaaacgtaaaagaaacggaacacgttggcaagtgaagggggagcaccgcgcggcgccaggaggagcgcggcggccgaggggtgtggagggcggggggtgtaacaggggtgctcaccatagatcatggccagcccggtctcgtgcagaaagcgcacccggcggtgcttgaagagccagatggtgaggatggtgagcgtgagcagcaggatgaaggtgagcaggctcacgctgtcttgccggtggctctcctccgcctccttctcagtagcgagctcctccatggcgctgctgtcctccgccgccgccccagaggaggaggccgaggccgcggccgcgactcgcagcccccaacccagcagcagcggcagcagcagcagccgcggcggcggcgccccggtagcccgacccgagccagggcgcgccgcgtcaccaggctccatggtcccggggccccccgcgcctcctccgagcggggaccagcagcccgcgccgtcggcgggttctggcagcaccgcggacctgccggagtggccgtggccgctgcagctcctcctcctactcgcgccgggccggggctgcgcccggggccgcgcgggggaggggcgcgcgcagtgcgcaggatccccaagcaccgccccccgcccgcgcacctgttcgtcccccggccgcgccacgccgcaccgccccgcgggccaaccgagccacccaggcggggccgggtgttgccctcgggtctgcgggccggccgccggctgcttgcctctctgcgcttctcaccccgtcctggcgcacctgcccaggcagtctggggtcgtggggccagttcatgggcagccgccgccgcacttccgaaaggggacgccagaggtcgccggcgcctagcgggagcatcggcttggagtgactagccttgcggtctcgagtcccgtctctggcgccacggcgaagtgtttaatctcaggccagtgtgcagccgccctgggcccagtaaagtgggggctgtcagtgaaccgagcagccccgaagccacgttagcccctacacctctctttcctcatctctcaggttgcccttccagccccagaatctgctaggtttcattcaaacctctgttctcatcagactcaaatgtgaggactgataaggagttggaatcgggggagggcattgaagtatctccttcctcacttgagggaatagacttcgtctgcgctgtgctactaatccccttggggaatagggttgaaccagaaggaactgaacgcttgccattcctggtagatgagcagtagctggtcctaaggtggtggtggggggtgggggttaccctgatgaccctttcttttatgttgctcacctggtagctcagagagtcttttaatgactcttaagaccaaacccagctctgaacaaaattatggcgtggactctgaaggatgaagcctcttggaacaaattctcaggaaaactagaatcttcaatccaccttgctcctctggtcaaggaagaaacaagatcagattaatcactgagttcccagtgcttagcactgta

SEQ ID NO: 70762 - DNA, 2025 bp, Homo sapiens
ccgagtagctgggactacaggcacgtgccaccacacctggctattttttgtattttttgtagaggtggggttttgccatgttgcccaggcttgtctcaaactcctgagctcaagtgatctacctgcctcagcctcccaaagacctaggattacaggtgagagtcactcccattttttaaattaatgggagtgacagggtggaacattccaccctgtcactcccatcaatttgaagaaaacccagacagccagtctaggtttttggttttggtccttcttcatattccccgtggctctctcttgagacctctttttttctgtagctgtgttcatctctatctagtctcatcaaatgctgtgactttaattgccattataagtagctctcaaataaatatcttcaactatgaccattctctcgaaccccagactcacatattaaaccaccttagttgtctagtagacacctcaaactaaacacttacagaaccaaattcaacttttctgtttgaacttgctccttcattcttactcatctcagtaaatagaaaccttattctgctaggtgcttagattatctttgattcctctctttttctcataccccaatctaatccatcaggacttcttgttggtactaccttcaaaataaaaccaaaagccaatcacttctcatcatttccacagctaccttcctggtccaacctaatatcaactcttacttgaattagtggaatagcatgctaactggttgccctgctttctttcttgccttccccatatgctggtcttcgcatcaaagcaaggcttttacgtgcaaatcagatcatgtcacacctctgctaaaaaattcctgagtcaaactcagagtccttatcattctcctccctgatctggtgctgctactcctctgccttgatctcctaccagtcttctttttggccactgtgctgtatccacactggcttttgtgctgttcttagactatgccaaacatttcctgcctttcagcgtcaatatttgctgtctcttccacctggaatgcacttgttccggatagccaaatagcctggtcactcattgcccttaggtttctgctcaaatgactcattccttatcagagaggccctccctgatcattccctctaaaatagtacccttacctgtctttctttctttgccctcatttatttttctctttagcatttgtcccagttagctactgttgcctaacaagccatcccaaaacttagtggttttaaataacaaccattttactcacaattttgtgggataggtgttcaggcatcctgaggctgggagcggtggctcacacctgtaatcctagcactttgggaggccgaggcagccgatcacctgaggtcaggagtttgagaccagcctggctaacatggcaaaaccctgtctctactaaaaatacaaaaattagccaggagtggtggtgggcacttgtaatcccagccactagggaggctaaggcaagagaatcacttgaacccgggaggcgggggttgcagtcagccgagatcgggccactgcactccagcctgggcgacagagtaagattccgtctcaaaaaaaaaaaaaaaaagttcaagcatcttggggcctcagttgggatggatttaatggctgagagtgagcctcacatgcattgggtctcacttttgctgtatctgagctcctcacatctcctgcataaaggactctccatgtaactagcttggaattcctcattcctcacagcgaggtggtctcagagtagttggatatcttacatggtggctgacttctctcttagatgaagtggaaattgccaggcttttacagaggtgggcccagaactgatatagcaacacttctgcaacatgctcttggtcaaggaaggaaacaaggccagctcatagaagaagagagaaaatatattctaccacttggtagaaggaacagcatgcatgtgcaggaagggaaagaactgatgatagccatggctatctttggaga

SEQ ID NO: 70763 - DNA, 674 bp, Homo sapiens
ccataaaaggagaaaaaaaaccttatcctttcggtagaattccagggaataggaaatgaacagtgctattgtaccacacatttagaagatgagtcaaattagatcccctacacttcaaacaaacaaagagaaatatggggtgaaaattaaacttagattattttgattatagacaatcatattaagtttgctcaattcttctctttttctgactcaaggtgacaatacaccaacaaagctacaaagggagaaaatatattaaatacttcttttctagattctataaagggagtttttctggccacccaggaaaggaatctggctactatcataactgcaatgccaactgaatggaagccaaatagaaacactttggtacatggaatattgattcacagaagagctggctctaaactggggtatgctgacttggctccttttccctaaaatcttcctcctgcaaacacttcagagaggttgggacaggtttggctattaacaatcaatgatgggccgggcacggtagctcacacctgtaatcccagcactttgggaggccaaagtgggcggatcacttgaggtcaggagttcaagaccagcctggccaacacggcaaaaccctgtctctgttaaaaatacagaaattagcagggcatggtggtgggagcttataa

SEQ ID NO: 70764 - DNA, 1078 bp, Homo sapiens
ggcaaaaaaaacccggataccgagcctggcctcccaccagctagagaacccaccaagttccaggaggggcggggccgagggcggtccgtgccacagctgtgggcggggttgtccgtgcttgcgccagagccggcccgccccgccgccaggggctgtcgcaggagccaggcgtggattggtatgtgggtatgtcggcctctcttcataggccgcgcaggattgctcgagaggctttgattggctcaacaggcgctgagcgttcattggctgcgctgggtcgtcagggcgacgaaaaaggggaaggggtgctgggcctggcgggcaaactaaggctgcggaccgttgggcggttccgcggggcgttgtccggagagctgcgaggccggggttcccagggttcacgccacactctaggaagtgcctgagctagtgagctggccaacgagctccgcgggctgggaccatgggctgcttcttctccaagagacggaaggctgacaaggagtcgcggcccgagaacgaggaggagcggccaaagcagtacagctgggatcagcgcgagaaggtaatgaaagtcgtgtagccgccgtctcagcctccctgagccgctccgccaggtcccttacggcccgggaccgctgagggggccgacccaactgctgccgcactctcttgaacgcggatagctgaagtcggggtgcacgacttttttggggagcggggacgtgaagtacagcgctagagaggccgcccagagggctgtggagctccggaaggagccttaggagtttgttgtcgtggtagacagactcccccgggagctttctctgactccgaaccctgccttgctctgacttcctgttggagatgatcgattcgagagagggaaagagccgagaacgccctgaatctcaaatcacctcgtttcacccaccggcagcgtcaagcggggttttgtccagtcgtcgagttacgtatatgggaccgattctcatctcttccggggcttaatgttctgtggctgttttctcttttgtctgccctccccggcaaatctctttggtgcctcatgatatat

SEQ ID NO: 70765 - DNA, 1639 bp, Homo sapiens
ttacatcagcaaaatacctccagagcaacacctggattggcattcgatcaaataactgtgggcgatagcctaaccagtggacacatcgaaaaagccacacaacatcacaaaccacctgtgctggcaactgaataaatgaattatgttaatagccaccttggctttattattacaggtaattcaagcacaagcgacataaatcaatagcggccaccgagttgatgtatgagagtcccactttggaacttcagagttggaaggggccatgaaaagcttagtttgtatttcaacacagccgaggcatctgcacctcgtcctctctagcgctcggcggggctggggcgtctcgggcagtggcgcacccagctggacgggaggggagcccacctggaacgcggcgccgcgggtgcgggagcggcgagtgggcggggcgtcgaggcggcgggtggcgacggcgcccagcccgccagaagaacgcgcggcgggcagacggctgggagccgctccggtagggcgagcgcggccggcggtgggtgggaggagaggttgggggaggaaggaaagggaagaggcggagcgtgggagcgcacagtgtcaggaatacaatagtgctccgcgccgcctcagccgccgccgccgcccaaccgcctgcccagcgctgaggcctgacgggccgggcggacgagggccgagggcgggagctgaggcgcggggggcggccccggcggggggcgggggcgaggaggggattaaggggcaggtgcgagggagggaagagaagaaagcgagcggttaggggggcggttaccactccgaccggactcacccggcacattgccgggccgcggcgtggagccgggcaggagccgcgagccagctgcgcgaaggtaggcgccgcggaggccggacccggcgcgggcgaggttgggggcgtcgcaccggctgggcggcgggagcggcggcctccgggagtggaagcgggcggcgcggagcgcacagtcccggcccggcctcgccgcgctccgggtcgctccggttccacatcgtggtcgcctccggcgtccccggcgccttggggccgagagcgtgtgtgggctgaggtaaagtgcctggtggcccctctgcccgcccgggtagtgcctggtggcccgggcggggggcgggggcggacgcgcgagctcggctgcagctcccggctacaccgggcaggaattgagcgccataactgttgcggctctttcctccggtgccccctcctggcgccccctcctccgttcctgccctttgcctggcttcggggctgacggggccagacccgtggcgggaggacctgctctgtcggccgccaggggtcggatgctccagggagcgagggcgcgccctggctgtttagctgttggggggcggaaagaaccgagtgcctggagaggggagaacgggtggtgctgggtgcggcgaggcaccccgggaagcccgggtgcccacccggcgggagcgggagcgcgggcgcccggcgggctggcgaactttccctcccactggcggcattgttcgaactgcgggtccgtggccgccgagcgtcgggcggtccgggggtgggaaaatcgtgagggctttgctagtcttccggggaaatttt

SEQ ID NO: 70766 - DNA, 1789 bp, Homo sapiens
cacttatgctgttccagttactgactgttgtgcaacaaacaactgcaaaatttagtggcataaaaccaccaccactttatcacttcatgaattttgtgggtcaggaattcagataggcacagcagtgatgacttttttctactccacaatgtatgggacctcagttgggaagattcaaacagctggatcatctggagacgtcttcactcatctggcatctttgactgggatggctgggcttagcagagactacctccagagtgcctatctaaggcctctctggcataggtggcttctcaatagtcaaacttcttacatggcagctcaggagtcctagtatgagtgttccaatgaacaaggcagattgccttttatgatttagcctcagaagtctcatactctattgtattgaagtagtcacaagctcacccagatttaagtggaaggaggcacagatcctacctcccgaggagaagagaataaaaaaatttgcagctgtgttttaaaccttcatttatgggtttcacatcattttattgcaaggatccaggattaatgactgatttaaaatgtgatacacatccaggtctcagagcatccaagcttcaaaacaatttagcttcacaagaggaccatcatcagggtcatgacatgtgaacaattttaatactttcctatttgcttctggtcagtctttaattccaaacacatagaacacatgtgtttttaagtgttataggagtagactggtgccttaaaaaagagtaatttgtatctgtgtgatagatagcaaaaatggccccaattctttatccatgccctttccttatggatgctccttgaatctggactggctttgtggcttgcttagggcaatcgagtacagtatgaggtgatggtgtgccagttcagagcctaggcctcaagaggccttgctgcttctattcactcttagaaacctgaccaactaccatgagaacaagtctgggctagcctgctgcaggatgagagatgcatagctctgtgctcctacctcctaccactgccccagttgacagccgttggacttcaaaagcagagctccctgctgacctgtagttgaccataggcataaggggagaccagctgagaacagcagaactgctcagctgaacccagcccaaatgactgacccatagaatgaactaagtaattactattttaagccactaacttttgaagtggtcgttatacagcaatagttaactgacagaatttgaaacacagcttttaatgattaactgtagagtggaaatttcatcacaaacctcagtcgtactacactaaatcactttgggtactaattttccaaagtaggcattactgctgggatccacagaggaaggcactgtagctaatgccaagatcacagatgggtcaagcacttgacccaaaagaagtacataacagcagccatacgagtagcaaatgtcactctatctggaagtttctaatcctgtctgatgccaaggcagccataaggtacctcccctgtccagagataagcgtggcacctgcaaccagtggttaactatttaactggaatgtcagagtaacacatcagagcacccctataatcccagcactttgggaggccgaggcgggtggaccacaaggtcaggagttcgagaccagcctggccaacatggtgaaaccccgtctctactaacaatacaaaaattagctgggcgtggcggcaggcacgcataatcccagctacttgggaggcttaggcaggagaatcgtttga

SEQ ID NO: 70767 - DNA, 588 bp, Homo sapiens
cctagaccaccacaatgccttgcagagacacagttggggccctaatctatgagcaaaacctgattcccacccccctccaggtttctccatccttcaaatgcaagcacttaacatcctaaaatgtcacaaagcagtgcatttatccttgggagatagaatttggtgataaaatgcaagactgtaatgttaggaaggacagagtgtggggaaagccagagacaaacaggagagggaggaggagaaaggggttgaggaatgaagttctgcagggcaaaggttactggaaaacagcaggacagaagcaagagactacgacagagaggcagggccaaggaaaacaacgaggtcaatgatatgctacacaaagacaaagaactgtgcttccagatgagattaccacatatgcctttagagaagtggttctgtttttcagggggtcattatgtattcagccaatagtgcagctaatctgcttactcttagcaacttttgtccacctaactgcaccaaacactacatatctgaaactattatttcagagatataaatactttaagggggagggaaagcaacccaaaacatccatta

SEQ ID NO: 70768 - DNA, 1327 bp, Homo sapiens
cctttcctcttcccccaccaaaaacgtttttgcaagagttggccttcagccaccagggtcttctccactaggatggagaggagctttgttctttcctttttaacctgtttgggtttaaccgtcccagtctctctctgttcggcatttaacaacttttcttggttgaagtaagaggtaaactagctattcgtccaaactccaaagctcaggttcactgggccgtaagcctgtacccaccatccccgggcctgccaggggcggctttgcaggattcttccagccgcgggggacggggacggggacggggcggggtcccaggcccatgccatccacctgccaagccgccgggtcccgggaggcgtttcccctcccctcggcccgctgcctgaccttcgagccgcctgagaaatctccatcctggcgagtgcccgagccaggccggcctccccgccccctccctggaaaggaaaggccccggcgacaacagagccagacccgctcatcccgatctcccagaaggcgactgacagctgactgccagaaggagatcgcgccaggagactgactgctctgtgcccacccggggacccgggcccgttcagccgggctggctggtgcgccctctgcaaagcctgcgccagggaggaggcaggctcaaccttcagattcccagggcctctctgtcgctgtcgccgtcgccgtcgcccgaggtcccagcggctctaccagattgttgtggaggcctctcacccgcacaggtaccccgggtgcagcgcgggcacctgaagccccgtccccgctccctgctgcccagccacccctttgtggtcacgggccgggcctaaatggaacatttggcacccccgtcccctccccaccggcttctactagggagcatggggttaaaagtcgctattgcaaaagtcgtgccactgctcttgagccttatctaagactgataggatgaaggcctttgtagtctgaacactgccccccacccccgcttttttttttttttttttttccgagacaaggtctcagtctgtcgcccaggctggagcgccatggcccaatctcagctcactgcaacctcctcctcccaggttcaagcgattctccggcctcagccttcctagtagctaggaccacaggctcgaaccactaagcccggctaattttttgtattttttgtagagacgggctttcaccatgttgcccaggctggtctcaaactcctgacctcaatgttcctcccacctcagcctcccaaagtgctggaattacaggcacgagccaccagcaccggcctgagcccatttttaatagc

SEQ ID NO: 70769 - DNA, 1291 bp, Homo sapiens
tcccagctactcaggaggctgaggcacgagaatcgctggaacccgggaggcggaggttgcagtgagcggagatcgtgccactgcactccagcctgggcgacagagctagattccgtctcaaaaaaataaaaaatataaaataaaaaacagataagcgggtagggagctaccggtggaactgagtttcctctttaagggaaacgaggacaaggacaagatcccgtcttttctgcactcagtcgccccgcccccaacgcaagtaggcatgtttattggatgataagagggtcagtcaaagtaaggaccaaccctctactgccaaaagacacatactactcaagggcccctgactcagacgttctcactggtcggaaatgccatcaatcaagtttcaatccccgcccccttctcgcggaagaactatgggtgctaacctctctctcaggcctgctgtcaatcggctccgcatcctctagttctgcacatccccggccatcagagcacgaacttctggtcggtccgcctgccgttctttcacctatagagcccaccctctaaaggtgtccaagctgctccaaagaacaattgattaacccaacggctgtctttggccctcagaactgtcacacctggctccgcctcttcccggacatcatctgttgcaccagagactggcgggtctggaaagaagctctgagcccatccgcgtttctctgttggaccctgtcaggtctcttgttccgtgtccaatgtcagtcgggtagggaggcagtggggcagtcttggttctcatcccaccccggagtctctgcgcagccacaattcaggaaaacaatctggaggcgggttcaaaacactaagattgattgaacgcgctgatggtttggttttctcctatagcgctttggtagtggcttttatccagaccgccccccccccacccccccggaatgaaccctggtatagaaatgttacccgtatgtgtgcatatgattgtttttaatatatttcaatttgatgaatcagcctttttcaaggtcagattccagaccgacccttctggcgcccaccccccgcttttttttttttttttttttttccaaaatgaaagctttcccaaagaggccacgtttgtagggctagtggaattttttggaaaagggagaaagcggattctggatgaggacaatggtggcccagaagtcgctatgacttaagagtcttggcagaggcagaggctggggaaagcgagcagtgtttttcatttaggtggcatctgtacgaatcctag

SEQ ID NO: 70770 - DNA, 1475 bp, Homo sapiens
cccccccccccccgcctctcaccttctcatacaagttttcgtcctcgggttctgggtcctcttgccacggtgtggtcggttctgggggccgctttcccgccacagcggacggggcgaccacagtcctggagaagctagattcccagcggacgcgggcggccgggagccctcgcgtcgccgctgccgccaaaagacggcgagcgctcaaaccaaacagcccagccgccatgacagatggtgctgcagggtctcaggggcggggaaagaaatgcgactgtgcgcagctgcagtgggtgcgagcgcgacaatcatcgccccgcctccgccacgctatataggtcccagatctgatttggttttccaatgaggcggggcgttgagcaaccctctttgcctccagttgtcgtggcttcgtggggccaaccattttcggccaggctgagaaatttcttattgatgggtctgctcatttcctgcataggaagaaatcggtgacatttgggtggatacagttcccagccaatcgccccgagttccctcgcccactggggaaagaggcagagcttccgctagtctttcatcttcaaaggaaatcaagcttctaaaaagcgggccctgccgaattggctaatagctactccttttctccactaggggagcgttcgcaaggggtgtggggaggtggccagcgcttgccaatcagaggaggccagggctgtcccctagcgggcggtgaccaatcgccggggccggccagagcgcgcttccttagtaggtggatggtggtcggagcgccgactcccttctcgtcgtcgccattttgagctggtgactgtggccggctgggagtaggcggcagtgagtttccctgggagggcagcgcgcttggcgcttctcccctccccccgatctgcctccagtctcggacttggttgttgcgcgctccggctccggctgagctgggagagttggaggaggtggcggcgggcagaggtgatgtctgggagcccttccttgacagcccgggccgagaaggtgagcgtcgacgctggtcgtgggggcggaggtaaggggcccggggcggggacgtagaggaggcgcgagggcggacttcgggtcgggggagatgcgcggaacggaggggttggtgcaatgtctcaacccgggagggtttttttttttttggttttttttttttttttttttttttttggtgtgagcaaaggcgcgtgcgcgactgggacatgggatgggtgcatgcgggttgggggaagggagggacggatgggagtgggctactgtggatcactgtgtcggctacatcgaagtttatcagtggggaagcggttgtctgcgactttgagtttgtgcataggagaggggatgctgctctgtgttactctggtgtttatcggtccatggggaaatattctgtggttctggtctctattcctgggggatcggaggggggatgt

SEQ ID NO: 70771 - DNA, 1861 bp, Homo sapiens
ctttcattattcatgaacaggaaggcgtgctcactttgccttggctatagcatcgtaatccctatttgctgggcagggcagtcttgggtgtttcttcgccttatgcataattcataaattgggtggaacctttcttgacctctctgagtttccaggttgagctactgcagcagcataattcattattcaggacctgggagagtgtgttttccctgcagcagccccatttccctgcttacagtgtattagatgcagcaataggcgggcgtgccccttttattccaacccactgggcctcatgcattattcatgagtaagttgtggcctgggtctccttggcttccgggcccctgcaagatcatcattattcatgaatgggggtgtgtggcttccatgttttaacatctgctttctggttgctggttgttagtctaccaaccactcaacttcatgcataacttataatcaggaagcatggccttaacggtttttcttcgcttccttgacagcctggctgcaacaattcattcattagtcgcattccatgaggcgtggcctctgttttacctgttttcgttgttactgccacaatgtccaccaggtggtgctgttccacttctaaccgaatgaatcgcaaccgagtagggaactttatgcatgattcataagtaggcgcggcccgcttgcatccgggtttctgggggtggggcccaaggttttgttccggccccaggctcagcgtccgccatcttgtgtcggcggctcggctgtaaggaggtggcagggacaaccacaaccacaacggccgggggaggagaaggcggcagcggcgattctaggcggcccaggcggcggggaggaggagaaggaggagggtggcggccgggcttggcttcggctccttgaggagttggcggcggcgcgacccggggaaccggcattggtaaaaaaacgtcctttcactgcgcctcgccctgggcaggggtttcggggaggcactggagggccctgagccacgctgctgtcggggcgggccgcggtgactcgggagccaggaatcagcggagtagggagggggagcggatcctggggcggggccgactttccccggccaggaccactccggctccctctggttgcaaaatctgaccttggagtcggacccccaggatgtgcttttagagactcacgcccaacatctctagtctgggacctgactccgtcccgaaccttgtatctcagatcagaactcttccccagtctccaatagagatttacgtggatcagcattgctgatcagagctcctcaccattgaatgccgttaaagacctgccccagaatctcctttgagacacttcctagcttctcagtatttgtcctcaaggcttccaggacgggctagatctcgaaggggtccataggccctttatctctgtaagagagtcctctttagcattttccttcagacccccatcccacacacatgctagccgcgctcagagcttccaggggtactagaccctgtgaaaggccatttgggcctggcctttgtgtcgggggcccctcttcgccacacgtcaggtctcctaaccccaccctggccctagcatcttccatcagagactctgcccagtatttctactcagagacccctcttaccatctgccttgagagactcttcaattcctagactctgtcctttgacactttctctacttttatggaatttctcgctttttatacttccagtattcagagactactgagaggcctcagcatcttccccatcaggcaccttgaacccccagagccttccagtgcaccagataccagggaggaactgtttggatacataatcct

SEQ ID NO: 70772 - DNA, 1143 bp, Homo sapiens
atgggtgtttgttaattaaaaagtccaggccggaaagaggtgctctggaagctgagagttgtccctggagtatcccaggttgccagggcactgcagctaaatcctgatggaggagtaggagctcaccctggtggggaaggatggacattcaggcagagagcaaaatcccaaagatcatggcggagcaggcgtcgtcttgagaattggaagcaggtgggtgtggtaggagtgagctcagactttggctggagacagagttttactccagtgtctcacagggcatggcagacagacagcagcgggtgtttgtcaaataaatgagtcagctcttctccaaactccctcctcccagctacctcttcacctttcctggtatagtccaggggttcattttcgacccccacagagtctgatacacagtaggtgctatgtgtttgtgaaagaggctgacccagcaaagcctggatgtgtttgccttgaggactgcctgagtcctccacaccagccctccattttttccccttcaccccaatgctgggcctgagcctccatctctccacaggtggtggtgctcaccaacacccccctggaggaccagctgcgagtgggtgagttctgtcacaaccgtggcatcaagctggtggtggcagacacgcggggcctgtttgggtgagtggcagcccacctccctccctgtccccttttcccccaactcctaccaagcccaggccaagactctaggctctccctgccctcatcccttctcagctacccaggttttgggttctgtgttttcatctctccccatgtggcacaagtaccatcttacatcccagcagtgataggctgagtttgctcagcaagttttcactacatcttgagggacccgtgggacctgtatgtgcatgggacacaggcaccagccctattgcttccctctacaggcagctcttctgtgactttggagaggaaatgatcctcacagattccaatggggagcagccactcagtgctatggtttctatggttaccaaggtaaggagaccagccctagggttcctggcaggcaggtgggctgcagtagtccttcctgtctgctcttggtaccctgggcctgtttctgagactcactcttcctttaac

SEQ ID NO: 70773 - DNA, 2371 bp, Homo sapiens
cagccctttgagctggacttggggatagtgtggttttccaggcagaaggaagtgaaggattaggtcggcctggtagtacttggcacacaacatgcgcccaataaataaaatggaaataaaaccgcggagtgttctacttgtgttgactgacatcaaaacaaaacaaaaaaccctcagagtgaggggaggcacgggaggggctgtgccgggcaagagaggtggcaggaaaatccaacgcacggcgcctatgcaaatactcgtgtgaggcagaaaagaggctccgccccgctcgaagttccaagcatgcgcagtagcggctcctgcgcctctaaggatccgcctctttccttctttctcagcctgggttccaccccgggaggcccgctgtatgagatggagggcgggctaaaggcgggacgagactcgattgagcgcaattatgaccaatcaccttgcggaatattcggcctatagcgaaggaggagctcagaacaaaaaggagaccccacccccgccgacggtgaaaacctatgaaacctgggcggaggcgtgcggagtcgggtagagagcgaaatcacgcctcttcagtcagccacgccctttattcttgctcggcctcgccacagagagcaaatcagattggctgggcgacaacctcaaagggcggggctgcacacgttcactacgggaatgaggtagcggtggagggggcagttgggcggggataggccgtcctagctaaggtggtaaaggccaataactcttcaggctgcctctcctcgaaaagtcatcttctcgcgaacctttaaaatgccttcctccccaagcacctcaagggactagaactgagtgcttcatttgtcttttttcctccttgcaaaagtcccgtttgccaccatggggatgtaccaagtgagaccgagtagggggaacgagtggtgattgacgcgccaggttactggccactgctcacctaggcgctagcaaacttctgccaagatcggaactgagtactaaacagcctccacagttctccctggtgccgtctccggcttggcgccgcatcctcctctgggctcgcgatggccgcgtcccctcccgctgcggacgggtcctttggtacatgcagtccgaggtgagtcccctcctttccacttcacccttccgagcgcctgcgtgcgcatgcgcggagcgcggcgcgcgcggcggttgggccgttggctgttcggccctgggatccgccgccactccgcgatcagaccgctctgtgccgcgagccgccgtgagcactcggattcaagccggcgccaacgagtccgggggcatcgcccgcagcggccaagctcatggccggctgagcgggacgccgcctccgcctcagccaccgccgccgccgccgcctcctcctcctcagccggcggcggcccgggcccagcaaccatggctgaagactactgggacgggcgcctgcggcgaacaggaggagaaggaggtcgcgcggcctcatcccgggccgccgccccaggcgccgccgcgccggccccgcggctctgaggttgctcgcgcgcccccgccggtgagcgcgtccccgaggcgtggaggctgcccctcctccttcagaacccacctcgggcggtgcccaggggtctgggctgcggggctggcaggtgcccccacccccggcgaatttcccagaatgcaccggggcggggggtcatttggggcctccctgaccttggccccgccctgggcctgtcctgggagctggggttgggtagtgctgtgggtgctaatggggacctgggggagtcaaaggaccaaagggtgtggaaatgggtgacaatggggtgaaagacttgggggggttgctgatgggggtcggagcatgtggcagtaagcctcacgccaataagtcgtgtaaggttcaaggccccgtgtgtgcttgtggaaggagggcggggtgcggagcgggtgagggacccgagggtgtataacggggggtagggtgtcgaggaagttctaagacatgctcatagggattatgtccgcagagaggcccggtgtgtgttcatgggggacagggtggcacaggtaccagaacgtgtgttggtggggtcagggctctgaggcctggtgcgtggcgatgaggccctggatggtgttaatactgcgtgtctgtccgtggggcctgcagtgtgtgagaatgcagtgtgtgcttgtggagggcaggtagctgaaggactcgagtgtggtgtgtgcgccagtgggggtcatggctgtagagggtgtatgcctgtggcctcgaaggtctaggtagtttgggacccagtatatgctaatgagggcagagtggaggaaggacctgagggta

SEQ ID NO: 70774 - DNA, 1735 bp, Homo sapiens
cttgatccatgtcataacatctccatatttatctcaatgcttaagtggccctaagtccgtctgttaaactcactcccagagccttaagtcctgaaaactgcttcgaggaaccccggcgcttctggacttgatctgcacatgcttagtgtcagctccgaagcggccgctcgcccacaattacacctggtgggtgcccttacaccgcgccggtgcgtgcgtgcgcgtgcgcgtgtgcgtcgaaggagaggcgggctttccaatttccttcagtgactctcaggcaaggaacatggctgtctccttgggagtgtctctacgggagccgccatcttggaagggcggtcatttctgccgcggagcccgcggtcccctactcgatatacccctgtgggattttccagtggccgaggcactgggccatggaatgtaccaccaggcttctcccctccgccgcagcctctaggagttagtcacctccgaggccccggcgggcgaggcgctttgcctcttccgccctcagggtgccctcggcctcaggccgtccctaccggggagcctccgcctctttaaatatcgcccagcccccacccccaggagcaggtcgcgagacgcacccgcccccgcccctgccgccgcactgctctgtgggacgcggcgacccctctcccgcggcggccgggaccccgcgcccaccgcgtctggagcccacctggcggccccactggctacatttccgacctggaccccggccggctgcgggaaacactcggcgtctcggctgtcaccgaacctgtgcagttgccgcggggggagtcgtgcgtgtcagatttaggccaggaagcggaagtcgccagcagcgagagtttaacctctgtgggcgcagagggttgcggggattcagcgcccgggaccgtggatctgtgcagggagtcataggtgtgtgtgacatcagtggtggaacattttggctcgttttcacaattcagtcattatcctttctgctttcctcctggaagcattaaggttgaagttttcttctaaagatcaaagttttgatttgttatattagttcggatttgtttgatttttgtttgtgttcggtttcaagtgctgatttgtaacttttctcccccccccacacacgccttttgacccctgaattatttaaaagtccattgttggagtggcaaacatcctccgagactcaaagggcaaggccatgggcgctttattccggctgctgctccaggaacgtgggaaagcagcggagttttattctaggggaaggaaacaaaggcggccgagtgccagctgcacgtttggtgggatttggtcatcaggggtggacatgctgcccaatggagctgtcggcagtttgacccagcttggtccgtcgcgtcctgttctaggaatcgattattcaaagaaggaatttagagggactgcagaaaatgttacaggtcttaacaccattttgcatttccgcaaacgaacaagaagttaatccctgtgttagtgatttctaagcccatttgccttgtggcccaagaacgttgagtttgaaatttgatgaaacttgccttaaggctcaagtacgaggccagctttcaaaaatggttttgtgccttgattgaaaacactgtatcttctagttgttggatttatcgtactctgcggctctattggttcaagcttgtgcgttgggccttttaaaatgtgtgtttcctgataattc

SEQ ID NO: 70775 - DNA, 747 bp, Homo sapiens
taaaaataaacttcacacagcagtacatctcagatgtttataacaaaaaggagggtggatgtgtgtgtggggggtgagctttctaatttgaccacgtcaatattgtatctgccaagcagtttccaacttgtatcaagtcaaatgagtacttagttgttttctttagttcttagaatatttcccctacattctccatggctcggttctttccagaaaattccctggatggaattttccacatagcccagcagagggccctgtattctgagccacagtcaggcatacacagaagacactgcagacaccaatcagcaaatcaggaacgagaattcctctcctcccacactccagccaaagggctctcaggttccagttgcagccggtcagctaacaactgacggtgtctgcacttccttttagtctaggcggcggtagaaatggtttctaagaatacccagtggctctggaaaacatttccatcatgtgaatgagcctgcgcgtattttatattacagcttttattcccctcagattcctattctcattttaaaatgtatttaaaagatatagagacatataaagccttcagaggaaaatgcattaaaaaggaatatatcacaatggtaaaccatgattactactaaagagattatggcttatttcactccattctttaatttcccagattttacaccattatcgtgtttcttttattttgaatattctcttttcagaaagagaaaatat

SEQ ID NO: 70776 - DNA, 1500 bp, Homo sapiens
gcaggtaataacttgaagccaggcacgcagatcaaattcccacgaagacagggaaagacaggggtgctattttcattgatgtttacatttcaaagagatggctacaaggctcttaagaaaaacattccggggatgtaaaactggcaagagatttagcttttaaaaggacttacatacatctcaaagggacagagaaaattttacagttacaagttttctaaaggaaatgctctaagagagacgtctttctcttttgacaccagggaaaattcgatctttaaaaatttgtgtttaccccacaatacctccacacattgactggcatcgtgctcccttccaggtccgcacttccctcttcacctggccacctgtgactagtttttcatagtcctaatcaaccccattcctaaaggaagcctcccagacagcaggccgcccctcctaggcccagtcccccagcccccgccacaccagagacccgctgtcctcaaaggctatgaactacagtctcctagagctggtgaacatcgccgatcattggttctgattccaacccatttcaaagatggtaaaaactgagacacgggaaaatcataaaagggtgcttagggcactggcccaaaaagggtacttaaggatttctccgcccagatgccaaagccctaaggtcagccccaaatgacctgtgttctgctttatacgtctatgccactgttggggttaaagccctaggcacgcaggtcttgcctcaactgcgcctgcgcgagtcaggacgagcgcttgccccagatcttgacgtttcaggcggcccctcctaatccggaacacgactcacattccgttggtcttgccttgacagacgtgaccctgacccaataagggtggaaggctgagtcccgcagagccaataacgagagtccgagaggcgacggaggcggactctgtgaggaaacaagaagagaggcccaagatggagacggcggcggctgtagcggcgtgacaggtgagggcgggcccgggagggctcggtttctggagcggctgccgggcacgggcagggagcccggaccgaaagctcagctccaggatggctgcgcttgggccccggcgttccctgcccggaaccggaggagtggtttgacccggggcgagaccatcgtcgacagcgggggtggggtgggtaacaggaataggcgggcaaggctgcgggtgatggtttcgcccgctgctagtggtggtgcgcctgcgcagagccggaagccctttggtaggcgggacccgaccgagtggtgccgggattccgtcttaacccccgctaaggtgtccaatgacctttccttaccaactgcggggagtgtgtggaaacgcggttcactccccggtttccttattctggatcagtgtctgaccgcccccgccgggagaatgtcaggattctcgcctctgtaaccgccttccatgatccctcattcagtttagaccagtaatatgcctgtgacc

SEQ ID NO: 70777 - DNA, 634 bp, Homo sapiens
gttgaagggctgaactaatttgggtttgagtcatagggagcttgggggatgtgggtgattggatagattctggagactttaggggactgggccgggggaaatgcggcctctaagctctccgctgaggcggcttggaaggaatagtgactgacgtggaggtgggggaggtggctggcccgggcgaggcccagggagagggagaggaggcgggtgggagaggaggagggtgtatctcctttcgtcggcccgccccttggcttctgcactgatggtgggtggatgagtaatgcatccaggaagcctggaggcctgtggtttccgcacccgctgccacccccgcccctagcgtggacatttatcctctagcgctcaggccctgccgccatcgccgcagatccagcgcccagagagacaccagaggtaagcagggcccggggtggcccagcagggaccggagctgggctgcagcttgggtgctggccaccaggcccgtgcactcccgtgccagatgcctgtctactcagcttggcctgcgggtaccaggaccctgggctagtctagggggaagagggtcggaggctggaactgctttcccaaccccgaggctccaaactccctagaacccctgacatcc

SEQ ID NO: 70778 - DNA, 614 bp, Homo sapiens
ttacaccaccagttctccatgaagagaaacagagaagggtaagatcctagagagtgacaggaatgctgtttttacacagggtgtacaaggagttcttccccaaggaagtgacacctggcctgaaggaggggaggtagcaagccaggctgccctctgtgggggagggccttcaggcggagcgaacggcgtgtacaaaggctctgaggcagccaccctgaactatctaccgttcccgagacagttccaacctctgagggtaagcacgggctgctctccccgcagggagagctcttccctcacttcatggactcaattacacaatcatcgcattccaggaagaattcattcttcctctgcgtgatcaaaggtgccaaataacctgcctgcccttgcaaatctgttcttctttctgagtcttcagccttatgttcctctgcccctgttctggctattctggctcaaggttaccctgagcaagttactcagcctctctttgcttgtttcctcatctgtaaaatggggatattttactctcaaagtcaaatattctcaaaagtacacctaccctccaaggcttctgtgaggattaactgtgtcaattctgtaaaatactt

SEQ ID NO: 70779 - DNA, 1454 bp, Homo sapiens
aataaggccacggacgggtctcctgaaagttgaggctaggagaaatccaaacactcagatacacctactattaagggggctgaacactgtcacaggctagctccctataagtgggggtgggtggggggcgggtgggggtaggggtagggggaaagcctatggacgagtccaccctaagttggcgtggggaaaaacataagcacgcagaccgatccattatacaacgggagggggaggttaggccacggtcagatccactataagggacgaagggcttgagcaatgccacacgcaggtccaccagccgtggtggtggcggcggggagtcgaacaccagcaggccaccggccaagccacatcctctgcgcgggggcgggaaggatacgtggggtcacggactgggccctccaccctccaggcccagagctcacctgtgtgtagcgtggcggtggcgttggcaatgttggcagctccggggggcgggggctccatacgcggccccaccgccccccaggcctgggttccgaggcggcggtggaggtggtggtggcggtggcggcggcagcacctagaagccgcccctgcgtttccctacagctcacgtgggcccgaggaggaggagcccaatgtcccgccgctcgctgattggccaaagcgctattaatcggccgcaaggcctcgaggggttgggggacgggcccttccctacagagctgtgccgtgattggcgtaaggggaaatgatggaacgctcacggcccctggagtcccgaggaggcgcgttcggccttcacggtgctccacgccgattggctcaaggactgacggactgtgagcaactgaaaaggctcggggcctgtgtcgggggggcgggggtctgcctcacactgattggcttacatgggattgatggaagacagcccccaaggacgggggtgggtggccctgtttttctctgattggcggacgagggacttctagacccctgccaaaacaccaagggggcggtgtcgcacgccatgctgctcagcggaagcagggcttgtatagaaatgggcgtagcagccggcgggagtgggtcggactgggctccgcgtaggcgggcagggcagctctacggttagacaagaccatagagctgggtaaagacgaatttagaacacagcggaggtaggagggcaggatggctgtcaggcacacgaaagagcattgagtggcagaaacgaaatgctttcagagggcagggttgaactgcggccagagttaaaaaggggaggaacctggctctgcattgattggcggtggctggactcaacctagaataggggcccgactagggagagcgggatccaggtctgtgcccattggaagctggaacacttacaagcaggggctaagacaaggtagggctgagttagggtttgggtgtaatttggggtacctggggaatgattg

SEQ ID NO: 70780 - DNA, 1109 bp, Homo sapiens
acgtattcacaaggatgaagaatggccgagccaggattcgaacccgagaactgtggctccagaaaacaagccttaatctgttaaacatcggaggccgcgcatgcgctgacacgcccctgctatgaacgccacgtcccagccaaactgcaccccggatgtcgtccccacttctcgctccaaggagcgcggggccggactctgaacgcctcgcccgccaattcaaagggttggccctaactttgaacgccccacccaccacgtggaatgttccaaacgccccgccccccgcactgtcactcaccgcaagtcccgctgcagcacgtcactgatgaaggtctcgtagcgcagcactttctcccccgtggcctccaccgcccgccgcttagggggcgtcgccatgatgggctcctggggagtggggagggggaagaccatgttgaccgatccagtttggcctcacacacagttcatctctaccctctcaacgctgggaatcggcttgtccggctcaagctggaggttcagccttccgcccctcccaactcggggacccgaccacccagggacacccaagcgcggcctttacctcaggccgccagcaataagaacggttggtaggaaccgcggcttccgggtggcgcgggtgaatgacgtaagtggcaagcgcgctggccaaccaaatagccagttggggaggggcgggcctgagtggaagaagacgggccaaaggggagaagagaagggcagggcttcacggaatccgaggagatcaaagaagactagggcgtgcgagcaggggccgtctggcaataaaccggccaatgggggactgcaaaagcggcgcctggagcctatggagaccgtgtgtggctggtgggggtgggatttaatgggatttggcgggttctaaggtaggcgcgacgcacaggtggaggtagaggaagtgaagagtttaatatttaaaaggacctaaaaattgactatggttctggtctataaggaagatcccgtgtgatctgtcggcctggatattgatttttcacacgggaggtttggatttcactcctggcaatgggactgagtataagcatttaaaaggttttaaacag

SEQ ID NO: 70781 - DNA, 1711 bp, Homo sapiens
tattctctatgctcttgaggtcatttacccccattttatctgtatggtaaaaataatacatgatagtgcactactgcatctcttttaaactccctgttcagtgaccacaggtcggtaccttgaaatctaacaagaagattgtacctaagccatggaaattggtaaatgctagaaaccagcctcccttccccccacccctccccgccaccacccccgccccagccagtggttaaccatttaccagcacaccactgagggcatttagagcctagcacatggtaaacactatgataaacgttttcattatttttccgtttgtccactgggtcaggatgtatagtctttttttgtgtctgggatggaatttaaaatatttgaagatcacagaattacaaaagcccagagagtggctaagctacacctatttaaccctcccaataatgctgttaagtctatactattgattatccccactttccagacagggaaactgaagttctgaggcagtaaaactcaggcagcgccatgcattagctgtagtgcgatctgaaattgcagccgagcagcctccgcgcgctcgcgcacttcaagaacgcattttccttactgtcacgtttatgccccgagtggtaatttcgcttcccggcacgcgaaaaatgaatgggcgccatcttgcgcgtggcatcttgggaaatgtagtttacaggctcaataacaagcacggtccaagaagggaggggcgggggagcaaatcgatcttggcctcggaagaaaaagaacaaagaatcgctggcaacttgcgcgtcgcgtcgctgcagccacgcagtgcgtggattcagccgctttggccgtgcccgttgcatgccgggaaacgcagttcgcgagccccggatacgtcgacaatagatgacggggctcacgttgtacgttcacatcaggtcccggcccgccggaacctgggcgatccacgatgccgagtttgccacgctgcgacagcccataggcttgcccccccgggcattcgggtggactacgaacacaaactgaagccctaggacttgtcgcccgtttgcgctctcgccgaggcacaggctgctcgcggaccaccctgctccgaaaactaaggtgggccctggggcgcggaggacaggaatgcgggcggaggctattgaggcacgcctgcactgtcccgcctgcggggaaaggagggaggtccgccctgggcgccgtagctgtgtatggttcgggcggctggcaccgggtgggttctagacccaaggtttgtctgcagaaggggaccagtagacggggtggattcgaggtggggacatgggacgcagcggtcggagccgcctggaggggtacccggtggtcccgatggagctatcatctttgaggtattgatgaggagggacggggagtgtggtcagaaggctgttttgggaggttgggtggagcgtgagggtggggtgttactggggaatcaatgggggctaataagaatattttagtcgaactgttgttcattgattgattaatgaggggatggcagagtaagcaactagaatataacgagtgatggatgggaaaatgatcccccaggtattgatggaggtatgatattcaacgggttaatggaaagtgatggggcatcgtaatggcaaggatgatggtgaggttgtggggggaataatagatggatggaggtcat

SEQ ID NO: 70782 - DNA, 645 bp, Homo sapiens
tcaaagtatctcccgaaaagctacttattaattacaaaaggggatcatgcctgtaatcccagcactttgggaggccaatgcaggaggattgcttaagcccaggaatccgagaccagcctgggcaacatagtgagactgtttctacaaaaaatttaaaaattagccgggcatggtgactcacacctgtagtccttgaagattacatgagcccaggagttcaaagatgcagtgaaccatgattgtgtcaatgccctcaagcttgcgtaatagggcaagaccctgtctccaaaaaaaaagaaaaaaaattacaaagggaaaaatagtaaatttatactggtgaaaactagaagaccactttaagcaaaagatcaatgctaatactaacaatttcgagactaactgaaccctcctgcctcctgataacgctgagaacacagcgtcacttctgtggaattcctgccaaaaatgcagaattcaaatctaatcatgaggagacatcagataaacccaaattgaaggacattcttccaaagaactggtctgtgctctcccaaaacatcaagatcatgaaagttaagtgaagatggagacattgttccacattggaggagactaaaaaaacctgataacagaatgtatcttgtg

SEQ ID NO: 70783 - DNA, 1420 bp, Homo sapiens
agaagagagaatgaccgctgctattaggactgaggagttctgagcactgaagagctggggagggggtggttgcagtgtatagcgtgtgatctgcttgtaacagtttcgttgcattatactaagggttactctacctagaaaagggcggaggtgaaaggatgcaacgcaacgctaatttcaccagcggaagaagcgggtacagaccttaatgagtccccgttttgatcgactgataagggaatggggaaattgaagccaggactcgatgcagattggctacggatccaaaacgcccactaaccttggcgcgtcccagtctccaccccaaacctaactcaggtgaaaatggcgccacgcgcgggggcggggctagaggtacaaagagagtgtctattggttgggagcggcacgggccgccttcttcgcttcaccattggctcgctccgtaaggcaagagaacccactaggggatgagcccgaactagggatgtgacagagcgcgagacccagcctaaagagagcccggagccagcgtgggaggccgctgccgtcgcgcgccttggtgagtgccctccacccggcccctgctccctcccccagctctccccggctacgcggccagccctcggcgtgccagcgcgagaccctttgccacccgccccccccaccgcccttttgcgcctgcgcgagacccccagctaccgcacggttgtccagaggacagaagatccgtcttctcattgggcagcgggactggagggttctggttcggattgaccggctttgtgttccgttctagcgctgcacgccagacaccggcctttcaatatccgtctcttccctgcaggttgacggcgttgcacgctctcgcggggaggctctggctttccaaacgctggcaccgagggttgtagttctgattcgttttctttcctctgtcccccagttgcagttttcaggactacgtgggggagggaatagctttttgttgaacggtttaagacgctgacctgtgcaactggaccacgcctggttcctgtgtctcttaccaaaccgtgaccccggagcacaggactgggtttggtggtcgtgagcagtttgtgacccttgaaggaagacaccaggcctggtcctgtatctccctcgccagactgtgaccagggagggctgggatcaggtgttgttcccatgtgcctcccaccagactttgacccccgagggctgagaccgggactgtttctaccacatcataatatggcttctaaagggctggaacaagctttcagcctttctgtggccttgtgtttcagtcatgttctttttcttttcttttttattttattttgagacagagtctcgctctgttgcccaggctggagtgcagtggcatgaccccggctcactgcagcctctgcctccc

SEQ ID NO: 70784 - DNA, 1334 bp, Homo sapiens
tagcctgggcaacacagctaaaccctgtttatacaagatatacaaaaattggctgggcgtggtagcacgcgcctgtagtcccagctcttgggaggctgaggcaggaggatcgcttgatcatagctcactttgaggctacagtgagctgtgatcgcgccattgcactccaacctggatgacagagcgagaccctgcctaaaaaaataaaaaaaaaaaggatttttttctgttcagtggattcatttgaagcgagggccactggtatttgaaatagatgacatcatctgccagcagaggcgtgaggcaacttgaggcggggtgtgggcctgacgtcatcacgcagcctcttcctttccccgcccccttctcttggcgaacgaggcgtcagtttaacacctccgtgaatccggaagtatgctgtcaaaacaaccaaaccacggggctgggggaggcggggcctcagtaggcgtctgcacgctagctgaaatagagcaaaatgcccgacttttgggggcggggctcctggcaacagcactctaggcgcaggcgcagaggcgacctccaggcagggccaggtgggagggacggtggggggtagggtcgcgcggcgccctctgcgcctgcgccccggcacgaggtggggcggcgggcgtcagtacagtagagtgtgcgccggggtggggggcaacggtcagccgtcaccctgagacgggcggcggcgggatggcaacagcctccggggcctcggacttgtctggctccggagcgcccccgcccggtgtgggagctcaggcggcggcggccgctgaggaggaggagcgagaggtggtgcgggtccgagtcaaggtgaggctggcggtgagtcggcccagccgccgaggcatcccaggggagggggaggcggtggctgtcataggatggagggcgggacctgagatttcggacataacctgagcggcgaagcttgagggccaagtgatgatggcgaggggtagggagggcctgagagcctgagagcgttagcgacgtaccttggggcgtgggactgaaaatagagggacgaggcgggggtctatgggatgaatgggtggagcttatagacaaaggggaggggctatggggctggaggaggggccgcagtagttgagggtggggctctgaggaatgagaaggtgctggctctggagtcagtcaacccatgtgttgagagtgcacttatgtgcaagttcccactttgatgagctgacaggctcgtgggtggagacaactaaagaaatgagatgcttcggacactaaaataatgaaaaaggttatgaaatagggagtcacgttag

SEQ ID NO: 70785 - DNA, 2173 bp, Homo sapiens
ttttttttctttttttttttttttttttttttttgtatttttagtagagatggggtttcaccatgttggccatgcaggtctcgaactcctgaactcgtgaaccgcccgctttggcctcccaaagtgctgggaatacaggcgtgagccaccgcgcccggccagcatcctgttttgtaaaagccatctcaggcagtctattggtgagaaaattaaggggctggcttcacgccagcagtcagacaagggtgagggctgaagtcagagatgagatggaatgacgccagggaaaagggtcccatgacaggcggctagatgttgagcacagaggagaaagagtaggagtcagggtcaaaccttaaaacgttgggtctgacatcatggactgtgaagggtgatgacatcagtgacggtgggggataaaatgtcaggcctttaaagggtatgaggttaaagaactagaaggtgaaggaggttaacatcagagaatggcagggacctagaggaagacgactacgatggtgaggaagacatccgatccagcgggggaaatgatggcaaggacgggaggatgatgtcagggacagcaagtagtatgagattgagaaggttcctttgtggaagggataaaggcagctcagccggttgtgggggggatgctgacgtttagggtgcaccagctgttcaaaagtcgaccccatttccggaaacaccccatttccggaaacaccccatttcgcggagaacactgctcccttcgctttgctgtcccttcctctccccaccactccgctcctgctggcctcagccaatcagcacgcacgccgggacgcgcaaggggaacgttccgggacgttctcgctacgtactctttatcaatcgtcttccggcgcagccccgtccctgttttttgtgctcctccgagctcgctgttcgtccgggttttttacgttttaatttccaggtaagttgcatatgtcctgcgaaacggcggctcctcgccacacacgcgccgcgccggccgtgaccggggaatagcgagtggggagagtaatggccactgacacgtaggcttggctttctctgggacgggcgggtcccgtgcttggaggtgaaacatttcggttggtgggaggccggcgcgctgtatctgagtgtgaggcctaccgggagggactggtggcgtcggtggtggcagtgaccacgcgacagccgacacttactttccttatcccacgtggccgccgccatcttgttctgccggcgttaagggaacgcagggatgttctgggcttgcgcagtggcacaaaatgacgggcgtggcggctatgaatgtgagagcatgcgcaatgtggccccctaatggtggctgcgctgagccagctcctcagattaccaccttattggccgcctttctcagcttttctgtagttacccatattttgttcctctttcttgtctattttctgtgctttttctctgctttccgtctcgctattttctcacatctccattttctttctccttcctgccaccattcttcatgttcttcccacaggacttgaactgccatgtcctctgaagaaggaaagctcttcgtgggagggctcaactttaacaccgacgagcaggcactggaagaccacttcagcagtttcggacctatctctgagggtgagacgggccatactcacaatgggggttggtgagagaaagtctgggatccttgcatttcaaggagtattaactgaaaagttaggacccacgcctccaaattctttttcttcctaagcctatggtgtagactaaggatgaggggaagcgtctttgggattagtgggagcgctccgttttccctacctatgccatctccttttccggccaccctttgctacttaacctttggggtactgactggtccacattgctccatcttctctccctctcacagtggtcgttgtcaaggaccgggagactcagcggtccaggggttttggtttcatcaccttcaccaacccagagcatgcttcagttgccatgagagccatgaacggagaggtggggcctcctatctgcagagggaccttgtccccatctgcggcttccttcattctttttgtttttccctctgtgtctgctcggggcagcgtggccaccaagccccgcagtgcccact

SEQ ID NO: 70786 - DNA, 4213 bp, Homo sapiens
aaaaaaaaaaaaaaaaaaacagctcttcctgtcttggcctcccaaagtgctggaattaacaggcatgagccaccgtgcccagccagaagtgtattgtttaatttccacatattggtgagtgttctgattttcctccttttattgatttctacttttataccattgtggtcagaaaggctcttgatatgatttcattcttcttaaatttgttaaaacttgattttgtgaagtttcattatatcatgcattggtggggtccacctacaataagctaaaacattgccgtgtaatgtaatgttagggagtgggaagcattaagggaaataaagcagggtgggggtggagagtgagatgtgatggtttacacatggcagtcagggaaggtgactctgaaaaggtgcctttcaacagagacccgatgttcgagggagagcagtcaaggaggatatccagtggtctagttcgtgggaatggttcctccatagcgctctggctccgttgcacgtctccacatgggccacgtaggtaagctgatgtaagtcttggcagaacgccctgtaatcctcggaacacagagcacggaaggtctgtggggaattctcacgaggccatttaccattcacctcctatctaccaaggagcctgttgtgagacagttttctccccacctcctgaggttctggtggggtttgaggctttctacccctcacctctgggctatagaactgcttagctgcagcatgaaattagctcctcagcaacaaggtgtcctgccacctggtgtgtggtcatctcgcccctttcatttcggtgttgcccggcacaagggacatgaaccagaatctgtggatgttcttgctttcgtggtccacgtaagtaacatctgaatgtaactagggcttgtttcatttccaaccaaacctgtcagccttaccttgcttcgacatctggaagagaattaaaggcagagggaaaagcaaacaggtgcaaaggccctgaggcaggagcttgcttggtgtgtggggaacagcaagaaagccagcggggcaggagcagagtgagccaggggccagtggtgggtggtgaggtcagggagggcccggagggcctcgtgggccacggagaggactttggctttttctctgagagagatgagagccacggcagggctctgagcagaggagggccctgggctgacttgggttgcaacaggatcattctggctgccgtgaggacagattgaggagagggggcgaggacggcagtggtgaggaggctgctgcagtcatccaaaccagtgatggtggtggcggcagtggacgccgagaggagagctcggattctggcatattctgaaggtggaactcacagggtttgctgacagatcaagcaaagcgagggcgggatgacaaagtacttgttaggaatccacactagatgagctcacaaaaagtaacttgacagttggtgttagtgttgtggttaagaacagggattcggagccaagtggcctacatataaatccagttccattgcttactggctgtgtgaccttgggcaggtcacttcctctctttgttttcatttcctcacctgtgagatgagatggcaatagtatctacttcacaagactgctgttgtaaggattacacaaggttttctattaatgtaaagtgcttcaggctgggcacagtggctcatacctgtaatcccagcactttgggaggccgaggcgggtggatcacttgaggtcaggagttcgagaccagcctggctaacaaggagaaaccccgtctctactaaaaatacaaaaattagctaggcatggtggcgcatgcctgtaatcccagctactcggaaggccgaggcaggataactgcttgaactcgggaggcagaggttgcagtgaaccgagattgcgccattgcactccagcctgaatgacagtgagactgtctcaaaaaaataacaaattaaaatgaataaataaataaataaagtgcttcaaagagtgcctggcataaataaagtgcttgttattagtgacatgaccatgggatgagaagtgtcagggaagtgagtcatagcaaagagcattccagataccaggaacactttgtacagttttcaaagcatgtgacaggaagccagcgtggctggaacataacctgatggagtaagagtgccaagaggtgaggttggagaggaagcctaggaggagatcagcccctcacggtagctggacgccattgcagaccttggtgcatagagcagtcctggaggtcagaagagaccaggaacagaactagatctgggacttagtgctgggggtgcacagagctaggagaaggacggggcattattgtcaacaatgctggctggttaccagtggttggtggtttctggtgtccaggataagaaacagtctagttcgagcagtaggacaaatacctaacgcatgcggggcttaaaacctagatgatgcgtggataggtggagcaaaccaccatggcacatgtatacctatgtaacaaacctgcatgttctgcacaggtatcccagaacttaaagtaaaaaacaaacaaacaaaaaaaaacaaaacagttcgacttcccactggagtccaaatactagttctaatattgtctacatctgtggccatgggcagtaaacccctctagagttcactttccctatcttcaaaatggggcttaaatgtcatacctacctccttaggtttgtgacagtacatataagatcagtatagtcagcactcagtaatgcaggctatcaccacaaccaggtgggacctatcccaggacagcaagggtggcttgacatttgaaaagcatgagatgtagttcaacatattagcaggaaagaaagagaatcaagggctgtaattgcctgggactgtgatatcagatgcaagggctaaacactcccagatctgcaatctagccctgaatgcctcactgggcaagctgaattgagatcttaagaccagagtgatcctagtcctacccctgtgaagtgatttccgctggctctgaatccgtggccgacaggctttaacgtccgccttatcctcacgctcagcagtccaaggctttgtgcattctggtttcagttcaaatttatttttcacacctgccccccagcaacaataaccaaactactatttttttttttaagaagagtctcactctgttgcccaggctggagtgcagtggcgtgatctcggctcacttcaaccttcacctcccaggttcaagcgattctcctgcctcagcctcctcagtagctgggataacaggcacccaccaccatgcccagctaatttttctacttttagtagagatggggtttcaccatgttgagcaggctggtctcaaactcctggcctcaagtgatccacccgcatggcctcccaaagtgttgggattacaggcatgagtcgccatgcccggccaaactactatttcatttacaagtttaccaatttcttacattattattttcttactattgatcttggcagttagaatcgtagctccagggactgaagaagtatctgtcagaaggctggcttgctagttcagcacgctggggaccgcacagtgctccgtttgaggctttttccaaaggcagaaattttatttctgacttagggcatagagagttgtcaccaacccccatttgggggttgtgagaactttggcttcagaggcaaatgttttcccatcaggaaatgatgaaagttatgaactcatatcccaacccccactcaccccatttaggaagaaacttcagggatgagataagtgaatgaggattccgtgtctccactccaattacacctcagctccatggctcctcccgtttctctctctggccttgattctcagcacacctgtaccctgaaccacctacactttcccacctacacttttactttgtcctctgaagttggggcccaacttgagattttatttcagcctgtggtagcaatgaaaagcagacacagccaatgtggtccactgcgttcctttgcatttcttgtttttttttttttgtttgtttgtttgttttttttttgagacagggtctcactgcgttgcccaggctggagtgcagtggtgtgatcacggttcactgcagcctcaacttcgcaggctccagtgatctcccacctcagcctcttgaatagctg

SEQ ID NO: 70787 - DNA, 1474 bp, Homo sapiens
agttttgcttggacaagattgtgctgctaaaaagtggcctacaccactttttttgtttttgtttttgagacagggtttcactcccgtcgcccaggctagagtgcagtggcgcgatctcagctcactacaacctccgcgtcctgggctcaagcaatcctcctgccacaacctcccgagtagctgggactacaagcgcccgccaccatacccggctaatttttgtatttttagtagagacggggtttcaccatgttggccaggctggtcttgaactcctggcctcaagtgatccacctgcctcggcctccctaagtgctgggattacaggcgtgagccaccgcgcccggccctacaccactttttaaaagtcgtgtttcttctcttttttataatgttgtacttctgatttctagggaatgattagcaaactcacccctgacgctatgtcccttggacattatccttgtatacacaaaaagtgcaattaacgagtgggtagaagtcaaggggtggagcctccgtccttgggcttgaagccaatgtccctcaatgcgcctgcgagactcccacgccctgggaaggatgcctatcgattcgctctgggctcggcagttctttctgatagcaggcagccatcttgcctggagcctgagaaagggaggagagacagaaggaaccggcgacagtggtctcagggccgctccggggggcctcaagaaccggaggcagccccggaggtggtccccgatcccgggctatgctcttggatctgagaagggaaggcggagggcggcggggacaagatgggtggagaatgtcaagcaaggaatgctaggcgggggaggggcgttgctatggcgactggggaggggcggtgtctgttctgaatcgctgtgtgtcacccgggcgctgcccaggaagggcagggctggggtgatgaccatggtaacacccgggggggagttcgtgacatctccggcgcggagggactcgatgtctatggcaatggtcgcctggtggaagggacggaactagatcccttcgctcgggacgctcacattccaggcccttgtcctgcaggctgccgcgggcggacacgccagaggaggaggccggggaatggccgcggtgtggcagcaagtcttagcagtggacgcgaggtgaggcgtggggtcaaagcccatgggagcagaacttactgtggtgcatgcgcaatggcgataagtgaggctgggcggagaacttgccttatgcggctgcgtgggcatgccggaggtgagcatgcgcagtagcgggggcgggcacgcccgcggtgagttggctgcgccggagaggattctaaacagcaagctgggaaaatgtggtcagatgtgggcatgcgcaaagcggctacctgtgagagggaggtggggctcaggcaggtgacatcctatcccctatgggtgtcccctagacttttttttttttacatcat

SEQ ID NO: 70788 - DNA, 1673 bp, Homo sapiens
actgacgatgtgatgaggggcggattgaacgagtcacaggccagctggccaggagcaaaatcggcatagctgtctgactcgatggctgtacgtggttacggactgtctgccctgatagaatctcagcttcaacgcatcagaggagactgacttgaccaatggtggggatgagtcgcctgagaaatgacagactggctgacccactgacaggtggtgtggaggcttaatcctacctctagttgctgtgactatttgctttgagggcctagctggatgttgtgactgatcgtggtgtgaatgagaagtaatctgagggaaagacagtgaccaactgatagtgcccgacagggctgtattagatgctgacagtgacagcttgtcccgacctaatcacagcccgcctgggggcatggctggatgctgcagtctatgagaggatttagccagggagaatcgcagctggtcccagggctatggtgggtggagaggaggactgattgatctgctgacaacgtgaggacaggatggtcttagggaatgataaggcaggctggctaacagtgctgtctgcctgcctccagggagtcgccgctggccagggcacaaatggaagccagtattgactgcccagcagtgtggatgggggccgggagtctgactaggcacctgtctggggcgaccgcctgagcagttggatacggcactagtccacctgggagccccggcctgcttggggttaaaatgagatgacgggctgactgacggtgataacagggagtatgacaggactgaggaaccactgcgactggctgataacgtgattggctagcagtgtgacagacagaccagcgcacgggcagggcctctggcaactttagctaccgccgctgtcgctcccgctgccgccgccgcccagacgcactctgggaaagcgcggcgagcacccgcctccgggaccgagccgggcggcagggaggggttcggtcacggctctccggttggtccgcgcgggtgctgcgagtcgggagccgcggccaataggctgcgcgttcccggccacgcccgcgcgagcgctcttctcgcgaggccggctaggcccgaatgtcgttagccgtggggaaagatggcggaaaatttaaaaggtgaagcagtggaggcagaggcgcgggcccgctggccgggccgggtgggctggaggggtggcgttgccggctcggggccccggcgtccgaggccccggcgccgggagccggaagctcggcgcggaaaggatgaggctcggggagcgcgggcctggtgcgcggggctgggcggggctcaggggagggggcgcgcgcctcggaacgcagcgggcctggggctaagtggggacgcaggaggggggcgcgcgctgcagatcgcggccggaccggcgcgcgcacgcgcgggggcttgtcgaggaggccgcgcccgcgcgcgggaaaatcggcccctggtgaccgttacccattcggtgtccacgcgagacgccggaaggggagggaagataagggggacagacccccccttcagagtgcggggactgagaactcttctgggggaaagtatcgcctctcggcgtgatgggggaagggtttggaatagaggatctcccagaagagagaaatggggccttcctaataggacagctggac

SEQ ID NO: 70789 - DNA, 3651 bp, Homo sapiens
aacaaatctgtttacagctcaaacatgacctcacgccttctgacacagacccctcaacagttcaaagccaaggcagcctagtaatcaatatatttctattctattgataacagacaataccaaacacttcagagacctcacactttgtaaccccacacccaaagagctcagagacgtggaaatctgattacagacctccgggaaactcagagacttcacaatcagggataaagatccaccaatttctcagagaactcacaaactgggacaaaaatggaccaacagttcagagacctcacaacctcttctcagaccaccagacagcccagagacctcgcaccacggacacaatgctagagagccctaaaatcacttatgctggaacacaggcccgaaaactactcagaggctcacaccctggacacagattcctgttcagagatgtcatatactggacatagagttccccaaaatagctcacagcctttatacaccgagacagatccccaaacagctcagaggccccacagacctgaaagtgtggacataaaccctctatagagcttaaagacttcacaccctatgacaaaaaccctgaggaactgagatcacaccccctggacacggaccccaaacagcttagaaacctcatatcctaggctcagacccccaaacagttcggagtcttcccactctaaacgcagacctctaaatgcttaaggaatatcacatcctggactcagtcctcaaaaccattcatggaacttgccctttgtccttatccggaaagatttcagatggctgatagtcatggacacagatcaccaaacagctttgaaacctttgtgcaaagttggccacaaacagtagagacacttcataactggaacacagacccaaaacggcttaggacctcacattgtggacacaggctcccaaatgactcagagaacttctaacctgggagacagacatgaaaacagttcagagatatcacatcctggctaagtatgcccgcacagctcaagcacctcatattatgggacacaaaccctcaaagagttaacctcacaacctgaaaagtaaacccacaaacatgccaaagacctcacacagcagacagacaatgcaaaaatgctcagagttgacaaactttacaccctaggatacagaccccttaacagccgagtgacccagtgacatacaacccgggcatagacccccaaatactagagagacgtcagaaactgataacagaaccccaaactgctcagagaccccaaaccctagaaccagacccctaataagtcacagacctcataccctgggactgagactccctcaacaggaactgtctcactcttggaaacataacagttgagggacctcaacaccaaggaatacagagatcagagatctgacactttgggacacagagggtgaagcactccagaggcttgaaacagtaaaaagacattattagtacaaagacatcagactctggaaacagatcctgaaactgctcaggaaaatcaaccctaggacaaaacccacggcatcacagataactcatttgttgggacattggctcaaaacagtttggcggtgatactcaaatacatcagagttctcatacaagggtacaaacacctcacacctgaaaagagagactgctaaatagttcagagacatcatactctgcacaggaaccaccagagagttaagaaatttcacacctatagaccttcaaacaactcagaaaactcactcactggcgcacacacacccattacaagctcagagaccttaaccctggaacaaacccctaatgagtcagatatatcaaaccccgggactgagccctctgaaaaggaacagagacttcacgcctgaaaatatatcccaaacaggtcaagggactttgaaaccaaaagagctcagggaccacgtatcctaggacaccagtggacaaacagctcagagacctcacaaggtaaacacagtccgcaaaacagcccagtgaactcacccccctggaatgtagaccagaaaaagcgcagaaccctcgcattcaggattcagaatccttctgagacttagggtatagaccccaaaatatatttcagagaattaatatgctggatgcagagtatcaactaattcagaggcctcaaattgtgggacgtacacacccaaagagatcagagaactcacatcctggacatacaccaacaaacagaccagggacctcaaccctgtgacatgtgcgcgcgcgcgcgcacacacacacacacacacacacacacagctcagaaaatccaaattctaggaaacacacacccaaaaagaacggggacctcacatcctgtgacatactcacagaaagatcaaaaaccacacaagctgagatatacacccacaaatatttcagagaactaacatctggggccttatacccacaaacagatcacagaactcagtccctgagacatatacacataaaaataccagacacttcacatgccaggacatatacccatgaatagatcagagcactcacaccttgggaaataaaccaaagactacatcagggacctcacatattacttgaggcacacactcacaaagagaccagagactcaattcctgggacataaacccaaacacctcagagatctcgcatgctgggacaaagaaagaaagacaggtcagaacctcacaacctgggacacagagccacaaacagatcagagattacacactgttgacaaacatacaggaacagatcagaaccctcacatcctgagacatacaaccacaaggagatcagagagctcacatcttgacatacacccataaccaaactagacttgacattctggtacgctgaccctcaaagagatcagagaattcatacccttggacttacacccacaaataagtaatagaccttgcaggctagaaatacacatagagctagatggacggcctgtcatcctggaacataaacccaaaaagaggccagagaatttacgtcttgggacacacacccacagtcacaatagagacttcacatcctaaaatataaacccacaaaggatcagagatcataaaccaagggatatacacccacaaagggaacagatactgtccactgtgggatatacattgagaaagaccagagaaatgcacatcctaggaaatacactaaaaaatcctgggaaataaatccacagacagtaatgaaacactgggatatacaaacccacaaacagatcagagaccacacaccctgggacacatatccacagacagtatgagatttcacgtcctggaacaaacagcaagaaacaaatcagagacattaaacacttggcaatacatgtgaagagatcagagataacatagcctgggacactgacaaaatgttcacagacctcgcatgctaggaaatttgcccagaaaaagatcagaaacctcacatcctatgacacacaacctcaaatagatcacagacataaaatcctgcaaaacacacccacaaaccattcacaaatcttgcatcctggaacatacaatgacaaacaaatcagagacctcacatctaggggaggtcacacccataaagagaatacagataacagaccccga

SEQ ID NO: 70790 - DNA, 2574 bp, Homo sapiens
gatgaggaaacggagcacagaactgttcagcaacttgcccaaagtcacatggttaagtcccgtaacctcagtttccttatctgcaaagcagccttaataatgggaactacctcatagaattgtggtttacaacgatgcctgtcacataatacttgctatcattaccattccctgcccccactaagactccttccactcagaatattgcggcagaatattaatagctaatattcggccagtgtttcctgtgtaccaccatagtgaatattaactcggaaaatcctcacatttagcatcgtcaccacgcctattttggccgccaccaccaacgtccagtggcaacctcgctctcggcccagccacaaccagcccgcccgcgctacgtcatcacggcgcgtcgcgcgggaagtcgcggggaaaaggtaagatgccccttcctaattccctcgcttccttgcttgctctccagacaccgccgacccgaagggctcctaagtgactggacagggacggaggggcggcggctatggcatccgggacgacagcgacgatagccgaggcaagaaaaagcttgcaccgcagccctgtcgggaaccgccggcgcctgccttttacgtaggcgcagcacagctggcgtagcacgccgacgcaccgccccgtcgcctgtgagctcgcggtgtggctcagcccagctggcgtagcacgccgacgcaccgccccgccgcttgtgagctcgcgagaggtgtggctcgcgcgaggggcgcggccttgaggcacggtcccctctggaggcgggatctgggcgggcagtcgagagacgaggcccaatggaaaagaaaagcctgagcgctcgcgtccccacaggtcgccagaaacttggtggagcgagccaagggcggagtttgagaaaggggctgcgtccaatgagtggagcggtgagtacagcgcgtcgacggcggaggcgggaagggggcggaggccgaccgaaggcggctagggactggctgaagagggttagcgaaacgttagcggtcgggtctgggcagggggtggagctggttgaaggaacggggcagtcccctgaggagcggggctggttgaaacgctaggggcgggatctggcggagtggaaggtaccggtccggcccgataaggggtggagttaagtgaatcgttaagggtggagtcgaaaccggggtcggggccggggccggctgagtgaaagggtgggtgattatcccgggagataggccgaaagggcaggttcgtgaaggaatggggtctgggctgggcttagagggtctgggaatggggcttaggagagtagaaggggcggtgattggttggaaagggcaggccctaagacggactgtgtgagcccgggggctcattgctccgtgaaagggcaagaccagggaaagagaatcgtgtaaaaggggtggagtctagcgggccgggcggggccgggtagaatggccacctgagtggagggagaaggcctgagagaggcggagtttggaaggctgtggagaatcagatcgcgtaaggaatggaatctaatagagggggcggagcctggaaaagggcagagaggtggggtcctcagggcacactagccccctcacatacccacgctcctccccccacccccagaaccgcggcaggggccaagcctcctcaactatgacctcaaccggccaggattccaccacaaccaggcagcgaagaagtaggcagaacccccagtcgccccctcaggactccagtgtcacttcggtgaggccctagacccgccctgatgagggggagagggagcaagttggtcatgccctggactctgacccttctctctgattcacagaagcgaaatattaaaaagggagccgttccccgctctatccccaatctagcggaggtaaagaagaaaggcaaaatgaagaagctcggccaagcaatggaagaagacctaatcgtgggactgcaagggatggtgagcagggcctggctgcagtttagcctcgtatgacaatcaaaacccaaaggttccccaccctggacagttccctctgactcagggcctaaaatggatctgtgtctccttttttttttcctctgcaggatctgaaccttgaggctgaagcactggctggcactggcttggtgttggatgagcagttaaatgaattccattgcctctgggatgacaggtgaggctgggtcctccaggctgtctccaaaccacaaaaatacacacacttagagcccattagcaagaataaatcttttcttaccccagcctggatactggaagcagatgatttggggaggtagggctcacacttgaaagggttcttttatgtagctaacaaacatttattgagtgcctattgtgtgccaagagttggtgatacaaatgtaccaaacaacagacaggggtccttctctaggagcggattgatgagtaggagggcagatcattaaacagccaacagcagtatgaggtgtttaatgaagacagacttaagaccaggggattcaagggtgtataatagaggatcctaaactagtatccgg

SEQ ID NO: 70791 - DNA, 1263 bp, Homo sapiens
tggcacacgcagagttgacgtttcaataagcgacataggcgtgttaactagccaagacagactgtcagcaaagcaggaccgcgtcgcaccccttctccgacggtgagcccgtccaaccatgccccgccccttttcaatccggcacaactgggaaaaaccaagagcgaccgcgggaagcatccaccgtccccgccggccctcaacaggttcatccgtgccccgccccccactgacaaaggcgacctgggaaaaaccactggcggcaactctggggatttccggtcaacaccgtaccacccctagccgggatggatcgtccagcgtgtcttttttcgttaacagggctaggagattacgaagtcaggagaaacatggcgtggttcggccttcgccgcaccttctctggttgtggcccctcataacggagcccgaatgacaggaaccgagtgggggtagcgggagatacgttaagagtcccccgagtctggtacatggctctgtgcggccgatgcctcccccgcccgacccccacggctggccttggcgtcgcagcaatattccggatgcctgtgcccattgccgtaccagggctcccgagcgtactcctccatggcgctggcgtctggccgcgcagtcaggccacgcccccagcgtagacgcacaccggcgtcggagctttccgcctattaccgggcagcgattgggtcgctataccgcatgtcacgccaaggacgcactctcattggccaatcgagtttctgccatttgttcattgcctcctgagcgtagtccagttactttcaggctcggggagtgaaggcctcgttgagagaaggtctcattcggtgttttgggaagagagtcgtgtgggcccaggtatcgtagcggcgacacgagagagacgggcggtgtgacagccttccactacctgcacgagtgtattggtaacgttggggtgggtgcactcttttggagctggaggaagtgctgccctctgctcccccatcccagcgctttggtttctcccacccggcagtcatggggacgctggatgagcccatttctgaagtgcggaggggccgggcttcttaggctgtgggcggagcctgggcctgggagaggaacagggccctggagcacctggtttcggggacagtagggttggtgggagttgcgatgatattgccacctacctcttacatcttttagtgcgtatgttctgtccacccagctactggttcatttgagtagatcggagtcaga

SEQ ID NO: 70792 - DNA, 1693 bp, Homo sapiens
aggactcgccccaccctaactcacaatagtctctgtccctttataaggaaggaaccaccaccctcagaatagtctcccccttcttcagtgaggaactcccacacccgcagaatggtctcttccacacggaaggactccacatattcagaatggtttcggtggccttagccttcccaaaaagaattacccaccacactcacaatggtctctactctccatatgcggaaggatcccacaatcactctcagaatgttctcttccccgcccccaacacactgacaatgtgcacacacacacacacacacacgtcggtccacacgggatgctccctctcactttagtgaggaacattcccgactcccagcgatcccgacctccgcctcccatgcgactgctcgggcagactgtctcacccgcactggcggtccccggctccaatgcacccgcggaaaccgcccctggcccgggcgccgcggtggaaccaccagccccaaccgctgccatgttggcatctgcccggcccgtcccctcggcaacagaaaaaccacttccgcgttcgtcacttccgctgccgggccacctgagtgaaggtggagcgagagccgggatcgtcagggtggtggcttttctcctccgctcctaaaagctcaatgtatgaatagccccgggatttccaaattccgtcggatcgggaggccggggacacggcccgatcggcctacccaccatccctacagagcttcatcggcccattcctgtcactagacccgccttatcctgccgttcgtccgcttcactgatcgcgctttccagatcatcccccgatcttgtctcctagactcattggttcagccacccctttcatctcggctctttattggcagcttctccataaggcgccgccctttccgtatcagaaactaccaggtgcttcatggttggactgaaattccgctttcccgtcttccagcgaggcctcgccccctggagagcacacgggaatctggggacgaagaaactttgacctggcggggtcggggtgagggcgtactggcatcaggtgcgagtcaggaatgttaagctagcagataaaagcagagcaggtgaggataaacaagtgaaaatgcaaaggaaagttgacgcacataagggaagacaagtgagtcaccactgaggatggcaaaggggacaggcgaaaggctcacaggttagctagcatttggaagcagggcaagagtccgggccagaggcggtggctcacgcctgtaatcccagcactttgggaggctgagccgggcgatcacctgagctcaggagttccagcctgggcaaaacgacaaaaccccgtctcaaataaaaaaaaaaaattacccgggcttagtggtatgcacctgtacccagctactctggaggctgaggcaggagaaccgctggaacccggaaggcggagtttatactgaaccgagacaaataagcagggcaagagagggaacaactcaggtcggaacaagtgaaaccaacatggaatagggtaggccaggtaagtcaagtgttgaaggagaaattagagggatgggtatgtaagggtaaagatgggggaagaggctaaagataaagagcaaaacaggtgactacaccctggacagattccagtcagcgcccaaccccagccccgccctggccagtaccctga

SEQ ID NO: 70793 - DNA, 1085 bp, Homo sapiens
actcctcggacacggacacggacacacacacacacacacctggtcctctacacactctgcaggctcactcctcggtcaaccagcattccagggccaggacccccgcccccgccacacgcacctgaccctcccaagaccctcatgacggatacctggagtcgatctgtgaggcggtgtcctgcgaagacggtgccaaagccccccttacccaggagggggccgagtcgatactcggcctcgaacgcttcccgatccttgcctcctacgcaggcggaggcgaggaagtcagggtggcggcgtgctgagcccagccacgactccctccccccgcgctgcaacccatcattccagcccaccccgtctggttgcagtaggggaggatgtactcacctggcggcggcgtgggggtcccggggggcgcgggaggcccctgtagaggcttggtcaacatggaggtggcgctgcgcagattgagcccactgaacccgctaagcccgcagggcgtggacgcccggggcagcgcagctggggagccagggctggggggcgccagggtggaaagcagagaaactggtggcccggaagcgcccgcagacggcgcagcgttgagattcgccgcgcgcgccagccccaatgctactgagcctgggcacgcgcctcccgggagagtcaccctgggcgacagccccgcccacctggctttgatcaatccggacgcggcacctgctgtaccacagccaatcggagccagttcttatttgcataccaccctcatcgtttcaagggcccccttatgcaaatacacgctcggttcttccgaggaggcggggcctgcatgtaaatgagggggcttgaggtggggctcacaccaagaggaaaccggttctgggaatccctttgcagcaccgcgcttgttttggttgttgcgcggggttgttgttggtagtggtggcggtgtgtgtgtgtatttacacttaaaaaataactgcgcagtatcctttcctgggaagttggtttgccgccgctgcctggatattagcacagagatagcgccaggccgggcttctaagaattcgcgcttgtgg

SEQ ID NO: 70794 - DNA, 2827 bp, Homo sapiens
aggtgtctcacatccctaccgccagagaagactgtcaggcccagtgaaaacgcctagatcccttggggcgatctcaaacagccttccttgagtcccttcacagtctgggggtcccatctgccgtggccgctcacccctcaccccacagctcttacctgctcgacagtggcagggtccatagcctcgatgcgtgctgcagccgcctcatactcgtcctcactgttgtagcctgcgccgacctcctcacgctcgggactgcccccgccaaccgcgccaaccccgggagcttgacgtcgccgcttgctgtgcccaggcccggagcagcagccgcccacgcctacggcaccacccacacccaccaccacgcccgcggcacccacacccgccgccgctgcgcccagcgcgtcgccgggaccgccgccgggaccacctgggcccccgcaaggaggtggagaagcctgttgtggccggggacccgccactgcaccaggcggcacggccagcgcccagcgatgaagagcgcccggcggtcctggtagcgggccttgaggcggtggcgaagctcgcggacgggcccccacgacgccggagtcacggtcgcgatcgccgccgcccacgcccgtgccgccgccgcccacgcccacacctccgccgcgccgcggcgccgggggcatcggcccgggcggcggcggctcgttggcggggtcggcgtcgggaggcggcggcttctttttggggagtatagtcatggctgcactgccgagtaccccccaacaaacccggcgcggggcacgccgggagagaacccggatgagggggctagtgtagtgcgcgaggcacgacgggaacggcgagacccggataaagggatcgcggcaccggttcgagaaccctcggcggcggaggcggcggcggcggcggcggcggcggtggcggcgcgcgggtcacgccgagaggagaacccggatgtaaagtccaagatgaaggcagtgcggcgagtttgtcttagccttctctccaagtccagcaagtttattgctacgcttgttccggccttctgcttcaaaggaaacagaaccaaaacaagcacctcttcgctccgccccctcgcaggttcttgcactaccgggtggggccccggggcgctgcgcacgcgcgccagggcacagccccgccccttactcggaagtacgtgggcaaaatcgccgccgccgccgccacaacaattgcaacaccaaccaattgagcagctgcgtgggacctcgacgacgcccacgggccaatcacaggcgagtgctcgccctccggtgccctccgtctcaaatttcagtcaaagtcgacaccctggttcccagcctttctccccgtcagttccgtcttgctcttcacttttctccccgaagctctgacctgcaggcgtcggtactgcggacggacagcgtggcctgtcccacgtacgacaggaaaaacacctcccctccaggattccaacttgaacgctgtcagccggaatgactggaaaacatcaacactcccgggagcatagctggcccctgtagcgtcacttccggtcccacccacctacaaatacccttccgggggaggcggacaccgcttcgccccggcaacagcctgagttctgcggtgattggttaagagacgccgtcactcgcggcataccgaccaaccttgggacagacaggcgccgtggggacagtggttgtttgggaaacagacacgccttctctggcaccacagcactctcggcctcgcgttgacctccccgcccctatggctagtgcgcaggcgcggcccagccttttttttttttttttttttttttttcctaattgagacaggggtctcactctgtcgcccaggttggaatgcagtggcgcgatcatagctcactgcaaactccaactcccaggttcaagcgatcctcccgcctcagcctcccgaatagctgggaccacaggcgcgcaccactacgaccggctaatttttttttcacttttttgtagggacaaagtctcactatgttgcccaggctgatctccagctcccgggctcaagcgatcctcccgcctcggcttcccagagtgctgggattacaggcgttagtcaccgcgcctggccaagcccagcctttttctaaaactgagtttgcttgggtcgatcgaggtttatgaaagctctgtcaccagtcagcgtctcaaaatggggttggcagaatccctgctattgagtagctggagagctacacgctaatcctagctctgcccttcctgtctgagtgatctttgtcagtcatttaaaacccaccccgtcctcaatttttgttgttgttgtttacttttttatagaacgcttcacgtatttgcgtgtcatcctttcgcatagtgccatgctaatctctgtatcgttctaattttagtatatgtggtgcgaagtgagcacccatccttaatttctattctataaattggcaataattctaatccgaggatcagagattaatgcttgtgaagggcctggtgctgtgcccagcacataggaagtgttcaataaagtagtctgcatggtggtgcagtggaaggatcccaggctttggagccagaaagacctcagttccaggcacagatggaccattaccaactgtatgaccttgagcaagtcattgtgtcacttttgagattacccatgtgtaaaacaggaatgataatacctgcccagactacctcagggaatggttatggggttcagatgagctgatgaaccaagaaggtatttggagttcacttccagtcttaggagacaaaccata

SEQ ID NO: 70795 - DNA, 1405 bp, Homo sapiens
tcttcaccccaggcctaatgggatcacccttaatcatccaatggtgccgccccctcttaggatgcactaccaaccaccaatggcacaggatctccacctcccaggaacaatgacaacatctggggtctttccccaatccccgggcacagtggtatctcccccaaaacttaccacctcccacccgctaatggttctgccctctcaagggctcccaccaccatgacgcaaacgacccaacacccgcttccttcctctccagacaaaatggtttcgccttctcaggatctccttccctcaaagcccattatcatcacccgccgacggtgtcccctgcacgggcccaaaagtctcgtcccctccaggtctgagtaaggtaccgcctacttaatggcgctctcccagcccacaatgctaacagagtccaaccttcaaagccgcagagtatctcggaatccaatagtctcaccactccgagcctcagtttcccttctccagacccaccccataaactcagggtccatcccaaccaaccccttctcagagctgatagcacgacctctcgctaccccgcccccggtcgcctagccgggtggtctttcccaccgcgagcggcacctgcatccgctgaaactcctcctcagacagagcttgcgccatgttcctccccccacccccccgccagctttctgcgcagacgcagctcgcgcctcctggcagtattaaggtcggaccaaaccactggccaggaatggagggggtagaacctaattccgaagggcagcattttggagacgcagagaagagaacgaaaccgacgagtcaggtgaactgtaatacaacgttctacccgaatgtaagtcatctgattggcttttggactcttctaggccacccattgtgatacgacattattacatccccgtttcatgggtggactcgtcgctagggaagtctttgccgacagaaaatcacccttccgcggtattcctttaatgagaatgggtaacttaataaccatagaaatgaaagcggaagcttcgctctggtcttgttcccgcccctcctccgggagaccccaaaggggaatcccacctcttgtaaagcctttggccttttttttttttttttttttaaggtttgacacttattttgttatcatgatactgcatgtcacgttaggtaaaggacttagccaccaataaaaatagcagagtggaaagagtgacagtgaatcaaacgaaaaagctacattaaaacaaaacaaaaacaaaaaacaaaccagggtggtgaaacaccaggctcattcaagtattagaattcactataaccctcaccgatctgagagtaagaaatggtatctcagtgtagtttttttcttattttcttttttctttctgtttttgtt

SEQ ID NO: 70796 - DNA, 821 bp, Homo sapiens
tttaatatatatagggctagtcaagttatctatttcttcctgagtgggcattggtattttgtgtcttgcaaggaatttgttgtgagaagtatgggcataaatttgtttgtaatattctcctttatccttttttaaaattgaggtaaaatgtgcatgacataaaatttatcgttttaaccatctgtaagtgtacaattcaggagcattaagtacattcacagtgttgtgtaaccaacgccactgtctatttccagaactttttcatcatcccaaacagaaactctgtacccattaagcaataactctccattttccccatccccaaggccctggtaacctctattctactttcttcctctagtaacttgcctattctaaataccacatataagtggaatcaatatttgtcctgtgtctggcaaatttcacttagcgtattttcaaggttcatcctgaattggccttctccatctccaggcagtaagctgggcaaccatcatgcttaccttgtttgtttcccatctctcagggatcactttccttcattgtctaatgtccagtatctttttgttgttgttctgtttttgagacagggtctcactctcacccaggatggagtgcagtggcgcaatcacgggtcactgcagccttgacctcctgggctcaagcaatcctaccgcctcagccttccaaatagctgaggcttccagattagccaccacactcagctaatctgatgtccactatcgtgagatttgtttttccattttactcatctggatttttgtttgtttcaggcaggagggcaaattctgtcccca

SEQ ID NO: 70797 - DNA, 3303 bp, Homo sapiens
acagagcaagtaggggcatccctcagcataacagtcccttgtaacacaaactgaatgcatcacaaagagaactggaaataattcacttgacgtaaagatctaccatttcacaaatgagtttctcccagccccagccagagttcatgggatgccaacacatgcctaaatataaaatagaaatatcaaaggctcccctcgctccaacagactggatttacaagagggagaatttgggtggttgatccactttatacaagcattcttttcttaccggaggagcctgcccagccttctcctgtttttttggatagatcaaaacacacacacacccccaacactaacacccactggcgcacaaaataagaagccatatacacccatccctttaactatgtccactactgcgatgatctaggttgttacagaggaattagaagatggtgaatcgatatacagaaaggctctgctcagccccagagagcaagggacagttaacacacacgtggatgaatatgcatccttcaatttagctaaacatttagaatgctgagagattgctggtgacttcacttgacaagaatcctctcccctccccaaggatctgtcttccttcctctcctcaccctcagatggagccctaaaaccacccaggaagttgggaagaggaagctcgggcaagccactgagctcagcacaatcccaggcacaaaggaggcaaagaccccccccacccagggctcacacacccattgcacagaagttggaagagatgggcactggggtgagcagggagggctggggctccaaagcccattgatgaaagtaaggatgagaagaggccagaggggatccacccaggcagggatggtgcaatctgtactcgttccagctctatggacagattcaagattacccccaggagctcggagatcgaaaagaagataaaaagaaaaggggtgtggggctagggagtgggaagggctgagaggctagagcgagtagcagcatgaacaagagcctcctctgggttcccaaacaaggtctgaggcctctgagctaagaggtaacatcatcgccctctgcctggctgtctatcttccattcaggcccttaacaggtgtgggaagagggcttttccactatccttgggatctgccccagctgggtaggcgggcagaggggaaaggattattctggtcaagtcttgctgaatgttgcttctcttgttcattcacacgcactcacaaggctggtcccaggcagcatatctgagatacctccaaatccctccagattcatgttatccccaaacacagcaaccagtcactgagaggcaccaagctcccaagacagcacttctgtccctcaggaccccttctcccacactgagggaaaaaagattctaggattcccttaaaaccagtgcctcacctgacagtgtcccctcaaattcattcccctcatgtccgactgaaaatccccgaattcagcctctaatcagagaccctgtctaccaagttcagctatctcagaccagtttctggatactccagaataggccccgctagacgcagtcaagggctccccaaacctgacccagaccccgcttaatgcactcccacgactcctttaataaagccacaatccaagcaggccactgccggattccttaggtgcccccccaagacgggcgccccgacgtcctccaaggctaggccgagggcctccaatcccagtccggggcccccgctgcccccgagatcaggcccctgggagccccagtcggcactcccagccccaggcggccccgcacctgagcagctgagccgagtcggccggcctgcgctcctccaacagcacgaacacggctcgagggccctccgcgctggcctctacgccatcccgagctggttcggccgcatgagacatgacgcccggccccgggcgagccctgccaggccggtcgggcctcggcccggtccccctaacaaaataagagtcccccctccccccagctcgccactgccgcctcctccgctaagccatggagctagcactgcgcgggcgggcggcgtctgggagatgggatgggctgtgagtcatcccccgcccagaacggaccgacgccccccctcaacctaaccccggacgaccgccctcctccccctcgtcttcttccccctcctccctcctcccagggatggggaaactccacaggaagtgaccgcactggggatggatggcccgtctggccacgacccattagcgaggcggccaatcgctgaacggcgattcgagggcccaccctaagcgacgcctccgacgcggaggaaaaacgcgattcggcccgccctcattccgagaagcagcacccagaccacgccctcaggggcagcgacaaataggcgagggttgatttggttgaaccacgcctctatgtttgcgtcgctttcggagccacgccctctcttctcaaattatccctctgcaaggtaatattaagccgctccttgggtcctctgcgcctgcgcatcgatggccagtcggcgcacggagggtctcctggccaagcttttagctgcggaaccgcgccctctttcggccaatatttgtaatatctgagccctagaccgcgctccaacctcgatctggctgtgctctctcagccaaagccataactatgaggcacaggcagctacattccctgaaggtgcgggccagaaacccccccctttcgctgtccgcagtccagccgcccagctggtcttccgggagtattccgcctgttccatgccatcgagagcggttgtactatgttcattgcgctgcgcaatatgtgcttaataaattcttgacgggtgaatgaatctggtcccttcggtgaatgacgacttctggaatcacaaagatccaggtttgaatagggaaggggacctcccctctcccagcctcagctttcctggcctgttaaatgggggtcaaaatacctgtctggcagggttgttctgaggattaaagataatgtatgaaaagtgctagcaggttgtttggcatacaagaagcttcccaaaattagttgattcactcatttgttcacttattcaacattcactgagcgcttctgtatgccagacgcatgcaagccggctcgcacaaggcggagggtctcactcatatatcctcaggtgcaaatagctcacaaaacacccagacctacagccttcccttcctctttcctgacatcccaagaccccaccctgagttgcgcctccaggaatttcaccgggctttcatttaccttgg

SEQ ID NO: 70798 - DNA, 1109 bp, Homo sapiens
atttgaggaacaacagggagggtagctggggtttacaggtgtggggatagcttacagagagcagcttggggtactgcttgagggtccctgggggacgacttggggtgaggggcgccagtaggctccctgaggggcgtggcctcggcgagggagggctccgccgccctcgagaaagcgtgtgcgcacgcgctcccagcttgttcgctcctggcgctcccagggcaagaaaaatcgaagacccgagccggcgcttgcgcacttagtctccgccactgctgtggtctcgtgccccgccccccggtccccccaccctctaggctaggctgagcggcggaggtggccgtgccgctggaagcggacagacccgagttagaggtgggggcgggggtccatcgcccgcggccgggccggcgctcccctcctaccctccccgcgacccccgtctggcccccacggctaacggtagcgcagccgaacacggcccacgggcagggcgccgaagaggagcaggcgcgcgcccggggacgagcagggcgcagtgagggaggggcgcgtccactgccccggccggccgaccgacaccgaccccgcctactgcggcgcggggacccttggtgagtaaccagccccgcctgcggaggaagggaggggacagggtggggtgaaggcccggaaacgccgacggggcgtacctgcgcgcgcacccgcgacctctgaccccgtggcctcagccctgaccccttacgacctgactacatcttttttaaacctcaacccctgctggccttggcctcaggaccttccatccgagccctgacctaaccatattctggcctggtatggtcctcaacccctgttttgtccccctaaatccagtcctgaccccaaaccccatccagttatgtcctggggatctttgacctgaccctgatccttgcctgaccccgtctcatctctgaaacatcttgccctatcctaatgcccaacactgaccccagtttctgtcctgacgcttgacctgtctgttccctaaactcttatccagtctccaaacctcttccagtcatgtcctgtccccctaaccacaatctggtgtagttctgtcctga

SEQ ID NO: 70799 - DNA, 1384 bp, Homo sapiens
gcaatcctcccacctcagcctcccaaagtgctgagattacaggcaccagctaccctgcctggcccaggctgtcttcttagacatgctgagcaccctgagtggacctggccctgaaactgcccccaggggtgaccctagtcctggtggcagacaggcaagggttaaaaggtgtgggccggcccagttcctggccaggtaggctgggccattacctagtgggaggtggccaaggcatctgccactgctgctgactgccactaccagccggagccagggcctggtcgagacaactatttttgaggtatctgaggctaccccacagcactctctggcattggtgagcacctgggagcagtgggcccagggtgcgagggggataagggcattggggagctggggcagggtgtactgaagttcccttcggtagagagctaggtctgtgggagaggcacaccaacaatgcagggcagggtggtggtgggggggtaggggggcagtgagaatggagggcctgaggacaggggcaaagcccaaaacaccaatttcctttcctggcaccaagccgattcccggccggaaatggacgaggagggatcggggaaaagagaagtatgagtccccccttctccaccctatccctgcttcctttcctccccgccaggagtagcctctgtcctcccccaacccagggcccagctctccaagaaagaccagactgggctactaagaaaccattactcaggcacctgcctgcctatgcctgatttgttcactgcagtggaggaagcaggggctctggggagggtaatggcccagacattgagattttgtatttgctctaatagtggcaggatgtggaaatgaccccccaagtgttggggtgccacccaggtgaggtatcttggttgtaaacagttattacagccaggaatttctttctcggctgtggtgtcagaatggcagacctgaaaaacctgccgggcccgcctctgggtgtggggggtgccctctactgctctcccgctgcagctggtccctgggacaggatgggggccatggggtcactggtagggggagacctggggttggtgtgggggtgtgctggggaggggtttgctgggatccctttctcgccatctgggcggggatgaggcagctccaggccccaaggcaagtatgcagagggcaggtgagcggaggcagaagcttaggaactgggtgtgggggtgtggggcgttgactgtgtctagcctgcccagtgaccccatgactcatactctaactatgtccccccgaggtcgggctgatagggaggagttggggttcctgtgtggaccctgtctggacttccaggacgctctgagaaattagagaagaaaggatt

SEQ ID NO: 70800 - DNA, 572 bp, Homo sapiens
cgtccctggccaaccggcgcctccctccctcacccggcgagagcgaggccgatgccgaagcagagaaggtagttggtttggtagtagaggaggttgttgatgacgcggtggcaccatcgctgcgggtcgcatggatccggagccgccagacgcgccgaccccagaacaaagtcgtccagggcgcgtagcggtggcagccgcacctccgacatcctgccggttaatgtggctggaccagccaggagggggccggactacaacaaccgttacgcccctcgccaccgcggggcacaccgggaaatggagtctgggctgggcagctttttcctaacctcctaggtggattgcgcaggggcggcgatgcacgtgaccggaaaagcaactaacacgccgctcaggaaagcagcaaaggctgccgggaaatcaagcctttgccacgaagcgagatgctcccaacccttaaaactgccatccacccccgcgcggggcgccgcaggggctgctccgggcggtgccagcggctcaagcacaaagtagccagacagataagaaaggagggactgtcacaagga

SEQ ID NO: 70801 - DNA, 1774 bp, Homo sapiens
atacccttctaactgtaccccaacctatttgaccaccccagagtcctctcacacctttccccctcaaccggcttccccaaactccttcaggatgcctaccttgggatgaccccttctcatgccttggtaactacccttcagggccagcctagacattcccttagattggcttatgccctggggactctaccctaggattccccctagcactctaaattttccacccctgggacatctccttccttgtgttctgctgtccttgactacaacataacctggcctggacccaaccccaggaaccccccccatcctcctaagattccccctctagacccctatccaagaccccgccccagggcacccttgccttctaagacccttgcccaaaacaaaccacccaaaactcctacctaggagaacctcaacccctaagatgcctgcgcagtcccctactaagattactgccatagagcccccaacttcccttcaaatcctcaactccccaataactctggccagacatactccctcccccatcctccaagagtccaaatctccttcctttctttcagttacaccctccactggaatgcctcatgctctttctttggacagctctgccttagagttattctctggacagctccaactttcaacaccccttttttgcacctccattccaagactctgtccgggatgcctcgcccctctcccaagaccagccgcatgctccttccaacgccagcacccactcaagacctctgccttagacccctactcgaaagacttccagcctcccccagacccaaccaaccctgggatcgtgctccagcttcctgccgccttcaccggcctgacctccgcgtgtccctgacccgggccccagctgtcggtgccgcccgcggcccggttttctgacctcccgggccttggagcccggctcgggtgtttacatcaggccctacttccgggggagggagcctgtcgcaggaaatgactcaccccagctggaaaaaggcggccaccgccttcctcgcctagttcccgggtcttcggagcatcgcgagtgacagtggggttctccggggagggcgcggggagcggaggaaggttggctgggggaccggaggcgaagggggttcctcaaggccgagactgtctgagggaacccggaagggtggggagagagagcgtgccttgcccccagcaaagcgaaaccggccaagccctcagccccttggtcacccacaatgggggagtaaaccttccctgctaacaagacgcggacctccgcggcggccgagagtagccgcaccggttcgcaacacacagtcctcccaggcttccagaggggcggcgctgggggttacaggcgggggcggacctggagaccttgaaagtggagaaacctccttggctccgagaagccaaggaacagatttcgctttctttctccccaccctgtccccccaaccccgccagctctgagttttgtcttttgtgttttgtttagttttgttttctgagacagagtctcgctctgtctcccaggctggagtgcagtggcgcgatctcggctcactgcaacctccgcctcccgggttcaaacggttatcctgcctcagcctccggagtagctgggactgcaggcgtgcgccaccacgcccatctaatttttgtatttttagtagagacggggtttcaccatgttggtcaggctggtctcgaactcttgacctcaggttatccacccacctcggcctcccaaagtgct

SEQ ID NO: 70802 - DNA, 1327 bp, Homo sapiens
atctccccagtgcccccaactcataaatgtcagtgccttcgagaaataagtcctgcactctctgtttaactcaataccggcttctacaatggcccacaaatcactatcttcagcccagaccttccccagctccaggttcccaaacagcttcctagatgcctgattctcttctggaaatccctccctcagacccctcagacactcctctcctcattaagctgatggtggcctccatcaacctgaatctgccgctccatcccgttccccatatcggggacgcctcagcccttcagttgagacactagcaggtcctgtcattttctcattctttccttctcccagaacgcacagaccttagtgtcttcaagtcctagagacacttcttctcagtaatacatcctctcttcgcaattcccacagctatcaggcccaatttcctcaccccctcctataaactcccgccttctggcctccacgaatttactcaggctgtgtttcaggcttaacaggtcactgtcaccaagacaaacaactgagattcctccctcccgcttacgcccaccgcagagatttccaaggggtgaaagacccggcgcgtcacctctgcagctccctcccttccacggttttcaagaaatccttctcctccggagatggccccgcgccgtctcccgagtcggccagccgcctccgtgcggacgtgcgagtgaagccgaatgaaattggggcagtggaagcagccgtcagcggcaaaacaccctctttggagtcagccatcttgctccttttcccaggccggcgcgctgcttgctgggaaatttagtttgggttcagatcgctaggggccggccaaagtgcgtaaaaactaccttcccatcaaccactgtggcaccggcgggagggggcggtaaggggccgtgggaagtaattgtcgctctttcaaacgtggtgggagcgcgtcgcgccaagcgcccagggaaatgtagttttttttttgtttgttttgttttgttttttaagatggagtctcgctctgtttcacaggctggagtgcagtggcgtgatctcggctcactgcaacctccgcctcccaggttcaagcgattctcctgcctcagcctcccgagtagctgagactaaaggcatgcgccaccacgcctggctaatttttgtatttttagtagagacggggtttcaccgtgttagccaggatggtctcgatttcctgacctcgtgattctcctgcctcggcctcccacagtgctgggattacaggtgtgagccaccacgcctggctggaaatgtagtttttagcggggtaggcatg

SEQ ID NO: 70803 - DNA, 833 bp, Homo sapiens
ctccgaaactatcgagggagtggccaggggtcgccgggtatcctgaggggcatttctaggtcttcgagcgtccggaagcataggggttggccgaggccgagggtcggcgttgacctgtcccctcttgcgcgcaggccgcggcccctccccgctcgcgggccctagcgcccggcagctcctggcgcggttggacgcgcgccccctggcggcgcgagctgcggtcgacgtggcagcgctggtacgcagggcgggcgccacattgcgcctgcgccggaaggagggtgagtgactggcgcagggcctccgctgggggagggttcggagaggagttgggttcagtgggacaggcctggggggtcagcagctactgccctgtcttgggtggggccaaggggcgcgacttggggcggggatcggagggtgcttcgagtgggaggagccttggggttattctagcatattccttgagggttattgcagtcggcgagggctagattagatgagagtgcggaactggacccccgttctggcggcggtcctttttgaggaggcagggcctggagagtgcttggggggcgggcacgcagcgaaggggcaggcctgaaatgtgagtcacgggggtggagcctatagtcccatgggggcggggcttgagatgtcaggaatgggatgagggttagaggctaattagagggcgtgctatggaaggttcaggagccaaattttggagtagcattctccagggtgggccgaatggtgttgtttgagggatgtgttctgcgtgttattagagggagataggaaggcctggaagattattcacatggctgagc

SEQ ID NO: 70804 - DNA, 1447 bp, Homo sapiens
tttttttttttgtaacgcggcagctccaaaccccgctgagagtatatgcatgggaaaactttctgaaatcaaaaatattccgaattctggcaacatactgggccccaagtctttcggatttaactctgcctcggccgttttattcagttaaggaaactgagtcactccatcccaaagccagattcccgcggttctaagctgaagctgtctcgggtgcatttgcattccaaaaaggcgaagggtcccgctattactgctcctggtacctggagctgccaagcacccctgcgatggggcgccccgggggctgtgcgccaggctgggagtatccttggggggcggggcgagggggcttccggggcggcagcacctggcccggctccggccccgcccgcgtcagctctgcgcggtgattcactccctccttcgccccggggcccccttcccggccagacggcgggcaagacagctgggtgtacagcgtcctcgaaaccacgagcaagtgagcagatcctccgaggcaccagggactccagcccatgccatggcggattctgagcgcctctcggctcctggctgctgggccgcctgcaccaacttctcgcgcactcgaaagggaatcctcctgtttgctgagattgtgagcgttctggggcaggcgcgtgggcaaaagcgggatggggtggctggaccatgcggaactggatggtccgggtgaggcaggcacttggccggggcgctcggcagtggggtgcaggtgggtgggttcacggtggaggcccgaaacccggggcgcagggcgagtcggtggggtttgacgaaggttgttgagatctggtggtccccggggtgaagcaaggagcctataacgcatacggagggctacgtggggacagcctgcgtgaactcatcagtggacgcatcgaaggggtcccagggtgctgggaagtgggggcctcctgtggcagggcgtggcgcggcctgggcacaggagggcgggctggcagcgcgcccaggggcagggcctgttggggtggggcccccccgccccgcgctagtcccgcggtgtagagcgccccgcccttcgccagttcttcctcgcccttcagaggccgggcgggatgtccttagcttttcggggtttccacccttctcaaagtgggcgccgcctttgagtcacttgtaaaaggggtgcggcgcctttaacggagtcctgcctctctggtgtcactctcaccgcttcccaaaggggttgctgggggaaccgcgtgttccgccccggtcaaggccacaaagctggcgtcagcggggctcacaaaacacctggcagcgccactcccctcaggctgcccgtaacctagaagggaaaagaggaaactgaggcacccaactctactccttacttgttgggtgaccctggccaagccattaaacctctctgtgcctc

SEQ ID NO: 70805 - DNA, 1184 bp, Homo sapiens
ccttgtctctactaaaaatacaaaaattaggcgggcgcggtggcgggcgtctgtaatcccaggtacatgggaggctgaagcaggagaatcgcttgaacccaggaggcggaggttgcagtgagcggagatagcgccactgcactccagcctgggtgacagagattcagtctcaaaaaaaaaaaaaaaaaaaaaaagcagcagctcaggaggttcctgctcaacctaaggcttcaagacccagttctctggccctcaggattccctcccacaattcataagagaggggtccccaccaggtcccaggagtgctgatgaaagtgtgtggagaggtgattagggggtttgggccaccagatctacaccttcctccatccattcgcctccagcagccccagccccaggtctgggaatgcaggggatgggattcccagatcctctgtggggcacctattcgctatgcctatccattgcccccttgcctgggcctcagtttacccccgacccccaccgctgccctgactcccgctcaccgcacgcccggagcggcgcctccgggacccacgcgcgaacatggcgcgcccgggcagggtcaagccgggccgggtcaggcgaatgtaatccttgcgaccgtcaggccaccgcgcgtccggcctgggaactcggttccgtaaacctgacaccctcgtgggaggagcgcgccccgcagggcccgcccccgggcatgtggtctctccgctgccagggcgccccctgcctagaggtgaactgcacgtagcccggagtgccccgcgggaaaggcctctgccctcccgctccgggccggtgcggggcgtcacaaggcacgacccccagaatcccggcgtgccacgtggcctctcacgggacctggggcttgaaggttctgtagtggaggatggggagactcagaggtggccaactggactgagaggggtggcgcgctagggtgcttgtgttgacgttttgtgtcgatttatttcggatgcttatttgggagaggggttaaagacacctcttggctcctccccactggtgaggttccgagggtctccccgatgaatgctgcaacaatgggccccaacctcacccgcagccccagctggtgctcgctgggaacctgggaacctggccctagccaccagagagctagatcttatacgcactcc

SEQ ID NO: 70806 - DNA, 2313 bp, Homo sapiens
cggctaacaatcaggggcattcttggcttgtggcactgctcaagaaaaggttgtagttgggcagggaggacccagtaagtaactaactgcaacaggacagtcattttcactttcctagttcacacaccaaggtgtggtctaggccttcaggggctctgggtattcctggggcaatggggagtcacggagggttagggagagggtaaccccatccctgagaagcacatttttcctaatggctgcctgcgttctatggttctgctgtccggccacccaatacctcagactctgtctacacagcgtcctcctctccagcctccttattggctactcatgcctcccttcacaccacctacactgcccccgtcggctctgcttttttccccatcttgcctccaagtcctccctccgtcccgctgcactatctagcctcggcattggctcatcccatactagtactgtcctttgaggtctctacgccttcaccctggctccctcattggctatccgccagctctcgtcctcgctcccgccttcagcctccacctccattggctcggctccctacacacccgcctcttggtctccttttagccttcgtattggctagctccaccttggcaccaccccttcgaagccgcagtgcacgctcacaagcctccccattggctcgctgcagccattgtcgtcatcccacgcgtggctctccattggctgttctctctctctagctaccgttccaccgcctacgcaacccgcgggatctcccactttttgggcctctgcgttcgttcccggctgccctcatcgcctgtagccattccacttttcccaccgcccacatgcctctctcgctcagacttccgcattagctgtctgcttctgttttcttcatcatggatttcgcaccacccccattccggcctctccattgattcctcgatcatcccgccccctacaccgcccactcccgggcatccccattggctgcgtgcttctccggctctcaattcgctgtacgtcatccgtgcatggctgcccattggccctctgcaatacttgtcttcatctcaccgcctatgcccccgtgagccgtacccctccgcgctggccttcccattggctgcccgccccttcaggccctgcccccgccggtcccgccgccggtgccgtcggtgccgccgccgccgccgatatggcgcgtacggcccctgtggagcccccgctgcggcattccgcgcccccctcgccggccgcgggtgagccccgcacctcggtcgaggcggcggtggccccgcggagggtgctgttcgccgacgaggccttggggctgccgctggcgcagttgcgccgctaccggccgtggggcgggcccggggcgggcaagatggcggcggcggccgggcaagatggcggcggcggcggcggggccgacgaggacgacgatggcgaggatggggatgaaggggaggaggaagaggaggcttgccccgagccctcaccgctgtgccccgtccccgctggcggggggttttacctggtccccacattttcgctgccgcccgcgccgggccgtctggagcgcttggggcgcgtcatggtggagctggaggcgctgctgccgcctcccggagcggtccccgggggtgccggggtgtgggtgcctgggggccgcccgccggtgctgcgcgggttggtacgcgtgctgaaccgctccttcgagaaggcggtgcacgtgcgggcctcacacgacggctgggcttccttttgcgaccacccagcgcgctacgtcccgcgcagcccgccgtgggcaggagcgggaggaacaggagcaggagatcccatcctggatccggggctcggcctgggtcccggccaggcatccgcctcctcgcccgacgacggcggccgcaccgaccgctttgccttccagctgccctttgctgagggcgcgggcgatggggcgcgcctcgacttcgtggtgcgctatgagacccctgagggcactttctgggccaacaaccacggccgcaactacacagtcctgctccggatcgcacccgctcccacacccactgatgccgaagggctgccccagcagcagcagctgccgcagctggagccacagcccgagtgccagggtcccgtggaggctgaggccaggcagctgaagagctgcatgaagccggtgaggcgcaggtaatgtcagccagcgccacctccgccaacgcagggctgtgtctgggatggaggacaagcattccggcccaggaacccctcaggcctgctctccaggacagggaggagggtgca

SEQ ID NO: 70807 - DNA, 1098 bp, Homo sapiens
catcgggctgctcagcgtctgctgggccaggaggccggctgtcaagccattaacccacccgtggccttgggagcccaggaggacgcgagcagcaggcccagaccctgcagagcgctgataagatgggccagggacgcgcctctccaggcccagcggccttggtagcccggcccccccggagctggggtccaggcctccccagaactgcagctggagcttcatccttttcgggaagcgcaggacctggcgtgggaagggagacagggacgaggctagaggcaggctcggccgccgaaatgatggcctgtcacggcttctgcctgcgctccctaggacccccctcagaggggacatttcacagcctcagaaacatttctggacttggcacccgctcggcccccagccccgcagtggccgagggaagcctgcatagacgaggggaaggacgaggagaggggaggagacgatgaagggggtcagagcagcgattggagccgagagctggaagcgccttaaagagactgcgcggtccccgccccccttcccgccagcctcaatgaattagagctgtgtttcccaaacttgcctgatcataagcagcctctggggccctagttagagatacaggttccggagtacctcccttcgagattctgattcagtaggcctgcgggtggagccaaggaatctgtaattttaacacgctccccacgtgattctcgtgaacaagcaagtttggaaaatactgaattaaaggaaacggggcctggctgcagaagcagcctccactagggggcttcggcgggaggattcccgggggcgtcgcctgcttccgccgccgcctccttcagtgaaagtcccttttgggtccagctgccacagccaccgcgctccctcaggccgggcgggggacaccccaggtctgcgtggcccccgcgccgccacgcccagtggccgcccgagccctgcgagcagggggaggagccgccgccagtggaggcggaggaggtagaggaggcggagacggcggagaaggcggagaggaaggtggaggcggaggcgaaggtggaggggaaggcggaggcggcggggaaggcg

SEQ ID NO: 70808 - DNA, 586 bp, Homo sapiens
accttttttatatttgcctttctcccttttatacttaggacccctgtaactctaaattcttttggatatttctactttgccttcttggactttctgctaaatgaagactaagacttgtctggacccaggtttcctgagctgacccgactgcccgcagtttgatggcatttgtttagatgagactacatctttaaggcttctgtgcccggttaaaaatcttcctttctcccaggctggtccaaaggtctggtcacgtgactccaacagtgacatcacattctgaccgccagggaacactggtagttctttaggtggcgtttgttgctgtgaaaggcagagaatgcagcaagtgcccttctaaagcacttcagactggggcttcttttgtaaaagctccccaacctgaatgaccaaatgcgggctgccaaggttatttcttccttgaggcagaaaaaaagaaaactgtgattgaaggtaagcagacttgagcctgaccaaggactgaagcatgccccccgggagcaggggatctggagaattgcaagcagtctgttgtaggattctaatcactgcctgctctttgaga

SEQ ID NO: 70809 - DNA, 514 bp, Homo sapiens
ggaagagaaacacacatacatcagcaggggcaaatccatatgagtgtgcataagtatacacacagccacaaatggactcaataatgcatggagggcgtgaggtagggagtggtgagcttcaaaatagattctcttgttcttccgagagtctgtaaagtctgcatagctatcaggagctcacaatgagcactggatgaccagtatcccttaatagtggtgactcagaagatcagatgcctactatgagtcacagttgaaggtgtcccaacagtgaaccaggttaagggcttctatctgctttctgacctagaactccccctgcaggatgccctaggaataatggtcttcattgccccagagggactgcaggaacctgtgaagcagggaggaatggggaagtgcctctgtattcaccctgataaaataattgccaggatattagaatgaattgagtggcatcttttcctgtggtgagtattggggccttttatcccagagcaggggcagggtaaag

SEQ ID NO: 70810 - DNA, 1311 bp, Homo sapiens
tacccagcactctacccccatgccccctcaactctgttccctttcccccccaacacatggctctctgaaagtaccaaattatgcatggtttcaagtacaacctgttctcttgtaactctcagcctttttataagctattatttctttctggaataccctccacttcatccttgtccatctggtaaacctctactccttcttcaagtcagtacagaattcacacttatagaaagaaaccttcctttgcacccttaatcaaccttagactgttctcccttgatattcttactacctcctttgtatctctctattatggtgctgcttatattttattgtacttgtttctttccctgtgctggatattctgtgagggcaggaaccatgtctggatcctcaatatgttcctcagtacaggacctggacatagtcgatgttcaatcatcgctaaatacatgacgtgggcctggaataccaaaggcatttttggttatataagaataactttctggctattgtgttgatagatcttttaatcatggagtggaatatgaggcttgccccacgtagagtggccagcaaatgggacacctcagagaggctcctctagtgacttagaacccaaaaaagaaccctgggactaacccagctccaggcctaggaaacgttctactttgatgctgtttactgttacatgctactggagaactaatacaaaaatgtaacaatttggctggattatagacaaggactataaggaatgttaattgtcatcttcttaacatgtattccaggtgctccacaaactgacccctgcctgggtttccagctttgtcattccctcctctgactcacactttaccctctggccacaccaaactgcttacagcacctgctatgtcatgatgtgtcatacctctatgtttttatccatgctgtctttctgcccagagtagcttttcctttgcttaggtaattcctactaacaatttaagacttagctcgggcctcacttcttccaggaagccatttctaactaatcaacatgcacacacacacacacacactgagtctagatagatgtctctatgaatcaggactcttttgcttgtaagtcacagaaatacaatgcaaatatgcttaagccaaaagaagggggttattgatactaagaaaaattcaggcataattttaggcagttctagatccaggtgctcaaatggtgtctcagcaatctccttctatctcttggctctgatttctcctatattaactaaactctcaagcaaattttcccacatgatggccaagata

SEQ ID NO: 70811 - DNA, 1123 bp, Homo sapiens
taataaattattgttgactgtagtcaccctattgattctgataatatttgctttctttatgatgtttttgttaaaggacagaacttctgtaagccgtctaggtgattctgatgcaagatcttgtttgagaacctctggtctgacctgcaatatggcctataacctgtggctcattttcctaatgccgtagctagaaactttgtggcaatatctggcagcactgtatcaggattctttgagaaatccagaacaggtgtccagtagtgagttgacctccactcgtgtctccctttcctactgctcccaagtggagaagacagtcatgtcactcaccagtggctccacagcccttatactagtggacttttacctaggtgaatcaatatctgagtaaataaagccagaccagctatggctggacacagatcttggcttaaccccattctacagagacagggttgctggtcataacagccatataaaaggccatagaccccgaattcagagattgaaagaaattcaagtaattctcaaataaatgatgctctggggaaatggagacacctgagtttccaagtagaagaagcttggataattgttctgtttgtaaatgtgcagggtgagggcaaactagggaatttgttctgaagcttttgcatagcaagcatactattttgaattaggttgtatgcttttctggggactttgagggtgactaatggagatcataaggaatttaaagtcccaatcctgccctaatgccaacccaggtgtttctcccctagctggccctaaattctcttggccaataatgacaaatcatgcagaaatggactcgattgggttgaggaaagaactggcctgatgagacagcaaaaatctccagcctcactgtctagggtcagagttctcctatataaaagttagagatgaaaagtctaaactggagtcaccagacttgaaatcgtgtacactcagacccctgcactcacgtggttccctaagagaccacatgccacaccccacacacatgctttgagctgagacacagcattattctactctaaaacaacaacaacaaagcatttatttccaaaaaagggacaaggtcacgagaaaaggc

SEQ ID NO: 70812 - DNA, 1227 bp, Homo sapiens
ttgtaaccctatccttaaactatagaagccatcagcagaagttacaggcttatgggggcccactggaaagggaaaatcaaaaggcctgtggatttcaaattaatgagtgatcttaagttgcatttcctaagttcggctacagactcatatatttcatgagtccctccctacccattccttgcctctcccttcagttgctgggtttctgaatttctgtatagttaacccttatcttgcctcccatttgttcaatagaaatgatcacttttacttgaatcttttggtagaattgtataccatgtgttcctgtctaggtttaatcatcagattgtggtcaaattgctctgccagactgtgtgaacaaaaaagtgaatggaaattttcgttttaaaaaataatacttttggacttagcccgtggctaagaagaagtaaggaagccaagcgtacggatagcagcgaggggtcaatccacgcccggcgttgggtcgggggtggaggagtcggaagtggttggggtttgggggaggagatccgctcacacacaagaggagagtgttgagccgccatatctgctgctgccgccgcagttgcgaatgcagcatcggcgcttagctgcctccgcggtgcagctaaggttcgtgtcgctaccccttggcccttcgctcttgctgccttaaccccgccggcggagcccgctcttctggcctgttgagcccgctccctcactgccacacagcaagttccgagaccatggattcgggcagcagcagcagcgactcggcgcccgattgctgggaccaggtggacatggaatccccggggtcggccccgagcggggatggagtctcctctgcggtggccgaggcccagcgcgagcccctcagctcggctttcagccgtaagctcaacgtcaacgccaagcccttcgtgcctaacgtacacgccgcggagttcgtgccgtccttcctgcggggcccgactcagccgcccaccctcccggccggctccggcagcaacgatgaaacctgcaccggcgcgggataccctcaaggtaaaaggatgggacggggggcacctgtggaaccttcccgagaggaaccgttagtgtcgcttgaaggttccaattcagccgttaccatggaactttcagaacctgttgtagaaaatggagaggtggaaatggccctagaagaatcatgggagcacagtaaagaagtaagtgaag

SEQ ID NO: 70813 - DNA, 1703 bp, Homo sapiens
catctgtgggggagggggcgtagaggaaggggaggtgctgttgtatagtgtcgacctggttggtggtggggtggtgtgttggcaaagggggcgggaccgccttccagcgcacatgcgcatcatggtctccaggacgaagcttttgttgggaaagcaggcgggactgactttggctcttcagtgtttgcgcatgcgcgtaacgtcctgaggcggtgggtggtatattaggcgaagaggcggggtcgcccaagctgccgcgctggcattttctcctggacaaggagagagtgcggctgctgagagccgagcccagcaatcccgatcctctgagtcgtgaagaagggaggcagcgagggggttggggttggggcctgaggcaaggtgagaattagcccccagactgggcatctgccccctggtgcgggcccccatttttttttatcccgatcccttcaccctggattctgaatccccttccaccccccaaaccccaattcaatgcccctcccgatccttcctgattcaaaacccctgtccgatccctcccatcgttcgaaatcctcagattccttgacctcgatctgtactgttagatgattcctcctgactcaaaacctccatgcaacttcccaaatgcgaatcccaacccaaccgcacccccgctccgaattcagaactcatctgcttcccgatccccatttgaagcttcgccctgtcagtagcttctcggggttcagaacctccatctggacgcccattcacttttaccgctccgatccgttcctcctcacattcaccttatccgcccgcacagtcagaccacagtcacccccctcccaattaggtccttcgtatttgccctctgtagtataacgccctgcccctctcccacagcccccaggctccgctcttgccagagggacaggagccatggctcagaaaatggactgtggtgcgggcctcctcggcttccaggtgagatctccactccccaccccaccatttccccagccgacagtcacccctccccgcgggcctctttggtctcccaaacgccgggatccggtttgaccctatttagtgactagactccgtgggcttttcgaattcccatcgtttatcgaagggggggaggggcgtctcttttcagccatcagtccctgctcagagagaggggagaccctgttagtagtcagggcaatctgcccagagaatgcggggtgggtaaggaaccatttttttttttttccagaatcctgacgcttgtagagcagtctgtcaccccctcccccagcctcctgcctccaccctccctctttctgcattccccactctgtgcgaccccccttattctcaactccgcgatccgcctgccgtcctgagctgctactgcacgcctcttggagcgtccccggctcctgttcgtgcccactttccgcataccgccccacccctcattttgcccttgccctacttcacccctgccacatgtttagtacccgcctggtcccccatcgcccctcgcgggccccctagatctctgcctcagcccccctgtttttgcacccaccgcccgcctgcagctccgctgctgcgctgccacccgggctccctattcccaccccacctcctgcctcagaggcccagagatttaattttttcccccctgtgtttgcaggctgaggcctccgtagaagacagcg

SEQ ID NO: 70814 - DNA, 748 bp, Homo sapiens
tataacagcaaaatcgctgtcttccacaagagtacagaaacttgagtgaaaaaaaaattaatgggcattgttgacagtcatattctggaaaccccttaacagtgaattgctaaagtaacccatgacccaaattctgtcaatgtttaacttcaaaatgctctctgttgaggaaataatttctgtttcatgataatcttatcgtacttcgagttttctaattataaaagtatataaacaactctttaaaagccccttaaaatcatactaatatagctacctgtatgccaatgtcctgaattatccagattttaccaaacatactttcaaaaatacaaagcaaaggaaagagtggctgtcattcattgagctcttttctggcgttgctatcctgcttcactgaactttgttttgtcctgagccaatactgaagtacttacagtacagacacatttgagtattaacatttcaagcaaaatcattcacgttttctaatgtgaatggtagggagaacacaaaccttggaatgaaatatgaattccttctccatgactcaactgttcttggtaagcctccatttcagagcctcagttttcttatttataaaatggggctaacatccttatgcaaatgggctttattcagtgtattcaggtagggtgacttggcattctacatgctattaaagggtgcatacaatactgtggacaccttggctgagaagatcagacaacaacattctaagaagatc

SEQ ID NO: 70815 - DNA, 1776 bp, Homo sapiens
tctctcttggtcatggagaaaggtacaataataaggcattttttctcatcagtgctcagctcctgagaggcagggcgcccatcctttactgcacatcgtggaggggcgcagtctttcctgaggccaagggcatgaaggtgggcaggaggagacccctgaagacataggggttctggcagtagcctggtcagccccgggggtgggcgttgagatcgccagagaggatttatagagtaagggctgcgagggtacagggggtgtgtcacgtgggaagcgtgtgcaaaggctggcttgggcactttgggaggctgaggcggggggatcacacggttaggagttcgacaccagcctggccaatatggtgaaaccccgcctctactaaaaatacaaaaattagccgggcatggtggcgggtgcctgtagtcccagctatgcgtgaggctgaggcaagagaatcgcctaagcctgggaggcggaggttgcagtgagccgagatcgcgccactgcacaccagcctggggggacagagcgagactccgtctcaaaaaaaaaaaaaaaagcgcctggcttggtaggaggagaatggcctggtgactgacacaagtctcgaacgtggcgcggctggggcagtcgcgtccctcagccgtcagctcccaacagcaaggaaggaagccctggcggaccccgtgaaggatacaggagccgatctccccgggctccgaagcgtagtcccagagcccgtcaatcctacgccagcaacgccccacgggttgcgttttccggcgctacaggaacttcctgcgcggttgctgtggttgcgagggcgtgacaagtgggggttaccgacgccgtaagcacttcctgctcggctgctgtggttgcgggaacgggactagcgcggttgctatggttgcgaggccgtgactggggggggggggggttccggcgccgcaggaacttcctgcgcggttgctgtgattgagagggcgggattagaagttttgtgcagtggtgggtccctcttccctgttcgccggagccattgcgtcccgtaccattcccttctcgggtcgtagttctcctcccgctagcctgccccagtcgggctcggggccgaaaagcagaggagaagatggaatttcctctgcagttggcggcgttcggtttttgcggccggcaggtggcaatgttgcaccatggagccaccctgctcgcctcccgccccgcccttcgcgagcgaaaaaaggccgccgaaccttttccgagagaagaggctttttttttttcccttccctggggtctgcgccggtaggtcccggaggctgagattccgccctctgaggggccccctcgctaaaactcacagcctgtggacaaagcctttttggttttcaaatcggcctgtttcccgcgaggctgccttcttcctttagcaaccctcattctgctgcgctgaatgctctcgtcttttttttttggagacagagtctcgctctgtcgcccacgctgcagtgcagtggcgcgatctccgcgcactgcaagctccgcctcccgggttcacgccattctcctgcctcagcctcccgaatagctgggactacaggcgaccgccaccacaccttgctaattttttgtgttttgtttagtagagacggggtttcacctgttagccaggatggtctcgatcttctgacctcgtgatccacccgcctcggcctcccaaagtgctaggattacaggcgtgagccaccgggcccggcctggtctcatccttct

SEQ ID NO: 70816 - DNA, 1507 bp, Homo sapiens
ccaccgctgtgtgataggacggtggctaagattcgttttctttattctgcgttatttcgcctcgcatgttctccagcaaggctgaacgccctacctaatgaaagaatacagtgatgaaggccaacggattccaggacgacgtgggggaaagaccattcagagcagcagaataagggttactaagggacgcaggcaggtccgcgggagacaggccgatttgaaaagcaaaaaggctttgtccaccagtgctgagtttcagcgagggacccccccccctcgcccgccagaaggtggcaactcaggctccaggaccagccggttcacacgccagggaaggaggaaaaaaaaaaaacgacctcttccatcggaaaacgatgggcagcgttttttcgctcgcgaagggaggggcggaaggcgagcagggccactccacagtgcaacactgccacctgccggcgaaataaaccgaaagccaccaaccacagaggaaattccatcttctccactacttttcggcaccaagccctgagagatccactggggcaggaaaggagagcgacgaacagagaagggactggaacgggccgcgatggctccggcgaacagggaagagggactcacccctgcacaaaagcctcccctagtcccgccctcgcaaccacagcaactgcgcaataagttcctgcggcgccagacacccccactagttccgccctcggaaccatagcatccggacagaaagttcctgcgccgccggaaatacgcagtccggagggcggggctggcctaggattgacgagctctgggcctgcgcgtcggagcccggggaggtcggctcgtctcatcggggttcgccgcaggcttccttccctgcggttaggagctgacggctgagggacacgactgcccagccgccccgcgttcgagacctgtgccagtcccagagccattctcctcccatccagccagcctttgaacacgcttcccacgtggcacaccccgtcttccccgcagcccttaatccgccgatcctccctggcgatctcagcgcccccaggggctgaccaggccaccgccagaacctctccgtcctcacgggtctcctcctgcccacctaagtctcttctgccagcggtcatgccctgggcctcaggaaagaccgcacccctccacgatgtgaaggaatgcacgggcgtcatgcctgtctgagcactgatgagaaaaaccttaacaagccttacaaattattgtacctttctccatgaccaagagagattgcttctctctttcactgtcatcctacctccattgctaacataccccccaacaatgctaggaaccctcttccatttcagtggcctaccctaaggattcatcgagaagacagaagcaatccactgggaactcttagggcttcccaagcccggtctacccgtgcctgccctggcattctctgccgcccttctgcatacagtgctcctaactgaagccagctcctcacctcagc

SEQ ID NO: 70817 - DNA, 2249 bp, Homo sapiens
ggtccaaacatctccataggaagtcaagtctgcgggatgatgtgcagaaaaggccttgacattgccttcaacgaggaaaagaagaggacaattccctgaacccacctcaagggagacagagcaatccctgtgagactgatttcctgactggtccagcaggccaggatattatcatagatgaattggcctggcaaggtatgagtaaatatgagtcaacctacataggaataaaccaatgaccacatcaaacaccctcacagtcacaataattaccacttatctagtgcgtactacatacagacgctacctagtttaattcaatcctctaaataaccatttctgggatccatttcacgggctcagagagattacttctactttcccaaggtcacacagctgctcagcttcaaagtggagttttgaactcaagtctgtctcccttcaggactgcgatctttctattaatactatactatgctgcctgccttaaaggaagtgatgacaacagattggagaaacgtcttatttttacagcctcgacctaggtggcccgggctaagagatgtgcggggtgcctctctgtgaactccctccggcccactaggaatccctgtcttaaacccggagtgattctgaagggccggggtgggggtggatctctgactccaggtcacctgtgggcctcacaccacgagaggacccctggcccaacaccctttttccgatccgcgccgcaaccacaacggtcccagccaccccctctccccacctcgagctgccctccgccccagacttcgccgctggctatcctactgcttcattccgtctcgccgccggcgaaaaccggccccggggcttaccgcgggtgggcggatcttgcaaatgcccgatttctctgcgatgggcctgattttcgcgatgtagccaagagggtctcggaactcggcccagctaggctcgaacaccgggcactccggtggcggtaggaaatcgtcggaccccggctccatggtgggcccgaggtctgggccagggatcgggaggcttggaccgcccttaaggactcatggcgccgccgctgtttgaagccgaggcaatgctcggaggctaggccctaagcggggcagccgccgcccgccgagggcctaagggggcgtgtggccgtcgtgctctgagagtctcaggctgactctactgctaccgcctcttcgtcccgctccgtttcttccaaactgtgtggttgcctccccactaccgcagccttcgccaccacagttacctcccaaacgccgcggccttcagcgccgccgccgccatcttggtttgtcagcgtctcccctccccacaccacaacaaaccggatccttccgcggggtgtccttccgagcctcgtatacgttgcgtcacaccaagccctaggaaaccttcatatagtggagaccgagctaaataggctggtatgggtttctatttggaaggggttactcaaaagtaccaccccggactgagagaaaatagttcattgcaacggcggaggaacaagattgtaattagtttgccggatcgtctttccggatggaccggcggtgcacgtttaaaggccagtgatgcgcatgcgcgttatggagaccggaagaggagctggtgtccgtgggtggtggagtcaaaccggcactcccccgcagacctcaaccaggtcgctagccccgcaccagtgttctctgtcccttctccctggtcttaacggtatgggccgcggaaggcggctctgggagcctgattgcaaaggaccccttatgctggcccgcgggatggggggagatgtactaggctccagctctagacactgacacctctggggctttgaaataaggaaggcaggaagctgctcactccccggggattatggatttttaggattctgagtcccaagtaaaggaaggaaatctttatttcatccaaggttacaggtagagagatggggtttcgattcttaccccccaaaagtcactgggagtcagcattttaatgaacgctttcaactgttctgtattcacttttaccatgtacacatttgtggcatatactcctacaaaataagcctgtgtgtatgtatactttaactattggatgtttagcaacggcgtatttatccagtgtcaactgtgtaaaacacctgtttgcccatttgtgagcctacagtgcacttaccaaacatccgtgtacttttattgtatttattgtgtata

SEQ ID NO: 70818 - DNA, 1220 bp, Homo sapiens
gcctaaaaccatcttattttctccttatcttctttcccctctggaatataagttccctgtgagcatggagttggtttattctattctccgctgtttccacaacttgcaactgaataactcctgataaacaataagcattcaacaaatttggtaaattagttaatttcggcttttgacggtttcggtggtaggaaaagggcgagttcgaggcaactacctctgacatagcggtggggggtggggatcgacacctcaagcattctaaagactggagcgctgggtctgaaattcaaaagtgccgcctccagagaagagtagaaaggagttggagtgtaccaatgcgaggcgagagaggacgctgggctgaaacagaagtgcaccgtttgggaccgaaggccacgggagagctaccagcgtccccacattctccggagggggtcaagtaaggctgggaagccggctccggccggtccggcggggagccgcgcggcggaggactgagctggcgggaagctggttccagacgcgactcctttggcgggagggggaagtaggcggggtaactggcagctcggcctgtaccactgggccggggcgggggccgcgcaggaagcggcaagtgacacctggaaggggttcgagttagagcacccgcgcggggagagtgggttcgagcagaaccccctctggacgggcaaggaacccgtaaggtccgcgacgtttcaggttacatgggctgggttgtactactccggcaccggataaggggtccaggccgggacgtgcgcagggccgcggccaggtttatctcaccagagccattgggtccaatgatggcggtgaacctctgaaatggtccgataatctgtcgacccttgtacgacttaaagttctcaatctcaatcagtttcaggaaccccatgacggccgcggcgccggcggcagtaggacaggccgcgccgtacgcccgagaactgaggtagcccgcgcgggaaacgccgcagtgcaagccgggcgaccggcaaatgtcgcgagaatacgtccaggcctaacgggattttcgccttccggcaggagtgggaccaggggcggggactgatgttgcgtatacgaggagcgagctgacgactggcgtggtgcctccgcccccctttcttgttgcatggcaacaacaaacacttgctcctgcggaccagatccccggaggagttgttgctggg

SEQ ID NO: 70819 - DNA, 1799 bp, Homo sapiens
agttccgcttatatccaccttcctttcacagtcttggaaaaatcacctcatggtttacacatcccccccagcaggtgagctagaaagccaggagtcatctgtagacttagggaagccattataggaccagttgggttttctgttttttattcagagttgggaggaacgggagggagacgaccatcttctggcgatatgaaagtcgagaaaggcaaacaggaggggagcaagagaggaaaagaagaggatgtgaaaagcccgaaggaaggcaggagagcaagcaggtaggaataaaggcgaggaagcgggagccagctggcaccacagcgaggagtgacagccgccggcagcaggggccgggagctgggaggagggaggctcaggcaagccgcgctgagcctttcttctccttcccggactcctcaccacccatcctgctaaccaagggcctccaccttgctcgtcgtcagaggcagacagccaggacttggccctcttgggcttcctagctctccagcccgggagttagactagttttccaactcccccggccccaaatcgggaggacaataatgccttccgctccgcgcccgccaaggtcgagttaggaaagacttggaacagaattaaacggctttggggaagatgagtcagccgggcggggctgcagctgccagtgaaacccctgccagtgtgattgggcaacaaccagaagtagggggcccgcggggtggtggtgccatctcttaaaggcagtttatgtaataagtcttgatcgcgcacccactaaaggggcggctttggggtcagcctcaatttcctccactgtgaagtgggaatatgaatacttgacttatccgaaacgaatcatgtctgcaaggtgcctgggctataaaaagcggtcagtcagtagtcagggtcgtgcttagtgcagtgccctccaccctaggccactttcgccatgtgagactgtcccaaaggcggggatgtggggtgcagtggggagcccctgatcgggcacgggcagaagacaagttcttttttttctgccacttccaggtgaggaagaaaagacgcctgctccggaaccaagggttgggtggcgatgtactggcctcacccgctttaagcaaagtcaccttagatttaccatgtttgctattcactcattcattttctttattagagggactgctgattaaacggaaggacttacactaagactccagtacgaggctgtactatagacctgaccgagtgagcatgagaagacgagacccggcagaaggagggcgacagcgggcaccgagatccacaggtccagagtctagtcgccacccacaccctgtcttttgggagcggtgcgcgccatctgcgcatgcgctccccatccctgccaggtccccggcggggtcagccggctggctggtggaggtgctacccgcgcatgcgtgtcctgctcacaaggcgctcccagtgcggttggagtgtctccagtggagctggcagttgggaggacggaggcccggcccatagcgggtggctgttaggaggtatggataaaggacctgtgtatcttggtgcccgctgtcgccctccttctcccgaggtctcgtcttctcacactcactcggtgtgtgacagcgacaggtcacagagggcggtaaagtgcggcgcccttggggcggtttcgtctggcgcggagtagaggtggccggcagttgtggttgctcctttcacctggactcacctgtgtggtcccctggcagggactaaaaaccagaagacggaggggagtg

SEQ ID NO: 70820 - DNA, 2277 bp, Homo sapiens
aggcagggaagacagaaagcgggtttactggagagttatcctctacagccttctgagggggaggaatgaggaaggcaaggctaatggccgtaaacgaaaaggccacttaaactgcaatatccaaacaccgacccgttcatagtttcgcttaatagtggtttagcagcatgcagagctaagaaatccggatcagagtcatacaaacatgaagacttaaggaaatggaaggctactatggcaccatccacaaagatggagtaaatgcaggcaacaggataagctctattcaacgcctgcgccaaggggaccaatggaagggggagacagagcgggctagaggacttaggctaaactcgaatttagaactggggaaggagtcacagggaaaagctttgactcccccctcccttaaataccagcctcaactatccacgtagatgaagattagatgggacgacagaattaggaggggtgtggggagaggaggaggagtacaccagtgacactactgcttgaaccctaagccttagctctaaaaccgcgagagttggcgaagatgaccccacctcgagaaaaaccagggtattcatccgggtcgtcggaggtgctgagaacggaggttggccggcagaaaaggtaggggaaaggggccactcttcattggttgctcctctttcccaccgttcaatttaacccccaaccccactccccagcgaactccagactcccctcccacccttcccaatccgcccactgcggcggcgacaacggaggcgttgaccgatcggtggggcaaaggcgggcccacacgcggccgaggcccaggaaatggtgtcgcctcaacggacaagaaacgaggtggtcttcgcctcaggtctagtttaccggcaccccggcgtttcgccaatcgtcacctccttaacgctgggcacctcagaggcgtcataaaggcagatagccaacacctctgtgctgggtcctggccggacagacatcagcctccgccgccatcttaacagcaggcggaccgaccctagtcactgcccccccaccccccacccgcgagctacctcagccaccgccaacgaatcccacgaggacgtaaccctgctcccgcgagaattctccggcttagaacggcacgagccgaagaccttgccgccgcctccgcggctactgcagtcagtaaccgagccaccgccgcctccgcgcgatcccgcgagaacctctaccggacgggaaaagcctgagcccagccctttccagacccctcctccctcccaccaaagccgaagtagctacagcttcaccctacgcgaagcgaaaagcaaatgacgcacaacctaacgaagcagtgaggggcggagccaacctaccacggccggctcccgcatgcgttgagaactatcgcgatattacgctttagcctcggcgagaccttcttaattcaccgcaggatgccgcccgcgcctcgcctttaggaaacatgagatatcgcgagacctggtgcacactcctaaaaaggagaaaggcggagcttcatgaaaatgactgggagtttttcgggggaagggaggaaccctcccgtcctgcagggatctcgcctaccacgaggtttccgacccactgcggagctggctgccaaacctcgcgatgacacagctcagcgccaaatctcggccatgtcctgaaaactgcctccgcccccgatctaggtgtctagagcctagtgcttgaggaaaatttaaaaagtcaacctgtttattctcacgcttccgggcaaggctgtaccaattagccaaactccattctggaagcggagcaaagagtcccccattgttacctgtctccaggaataacatattatcctggactaacatttaaaagacgttcaatctcacagtaagcacacaaatgcaaatgaaaacaatgacataacattttttgcccattagatagggaaaaaaatttttaaacctacattatccagactccttccctcgccgcactgcaggctaacctgaatccatcttaatctaactaaaggccatatcattagttctagttccaaagccaccaattttaactactgaagctttaccttggcataaccaaaaagatccaataaagtggttttctccaaacaaaggagtctgccctcaaaggaatattcaagcttcggggatggggggaaatgcctgaagcttttaatatggcagtttttccacgtctagccaacagtgtttctccaataaatcttgggatccaatctggctt

SEQ ID NO: 70821 - DNA, 639 bp, Homo sapiens
gatttttaaacaagcagttagtcgaaatgaatgtgtgtgtgtgtgtagtaccatttagatatcaaaacatatatatgcaacgcctagtagttacccgcgaagcctgcctgcccgcccctcaccttccctctcctctgaggccgccttcctcgaaccagtgagaaacgctgaaggcccggcctctactctctctttagggccacttggccatggctaatgccggtacctcgcatcccctctgtcagccgctctctcgccgcgccgccggcagctgccgggctgcccccgaagatgcggctagctctccgctggcgcctgccgaggcctgggggaggggagaggaggcggggttcagggagggttggggcaggccgccatgcccctccagcagcctttcccgcaggctccccaaggccgccacctccgcgcctccgcgcagggtcccgtgggaactccccccccaacctcgccactgccacccgcgagaaaccgagaacggccgcgcgtacagagctcgccctccagcccagggatagacgctcacctcggccgcaatggctccgcggggcccgcaggagcgtgcggggtccgcggccctgcttcagccctgctccagccctgctccagccctgctccagc

SEQ ID NO: 70822 - DNA, 791 bp, Homo sapiens
ctaaaaacagagctgagaaaggaagagagagcaagtgaacacacctggccaccgcaccctgtgtagcctggcctgccctccttacctgccatgaaaccagtcctggcacatgtcacactcgatcatgaagcgggtcacatcgtaaggcagccggcagaggcaatacaccggcaccgaggccatcttcgctcggccctggagcgttctgcggccggccaggttcgtcgtgtcaagaggggcgggaggcggcagcacgcgtcctctctggacgatagctaggcacaaataacactttttacagagtgaatcagcccccgccccccacccccttgcaccaaccctcagttctccaatagagttaccgccgccgggatgcaacacagctggtgcggctgtagggggcaaccagagaaagtccacccggcccttagaatttctttcacacgtaaagaacggagctcaaccttccaggcttcccaccgcccccacactctccactccccaccccccaccttcttcggccccgttgtcagtgataacttctttccgggtttcaagaaaatacctgaagccttttcgggaagcttctttcatctctcactgaaccctcccctagctgacccctgtttcacagggctccctctattatgacgcaaaccacagcgtcaaaaatgaggctgggggtatctcaagacaagaccctcctctcaccacctgaaatagggccaaccagagagagataagggatccctgaaagtctcttcaggttactcaaagccttcacgaacaag

SEQ ID NO: 70823 - DNA, 2672 bp, Homo sapiens
actaggcgcccaactcaaatcacagttctggggtcgtgttcggagagtttaaataatcctttccatcactctcaatatcattccttccccgaccagtcaggagtctcatcacccccaaaactgaaataaatataaatctctaaactgaccagctcgttctgtactttaaagatgacagggttctggctgcatccctgaaactcaaaaggatctattcaaaacccctcaaactgactagaatttcctcacactcccgaaactaagcaaggattcttttgcatcgctcggaaactggcagcgtttccttgcagccccccctcaaactgatgagagctccctagtctccccaaatgttcaggtacctcacagtatatcctaaaactgacagtaatagcctcgcagcccccaaaacttacaggaatcttaacgcttccccaactgacaggaacctcctcacgccccaaacctgacaagaacgtcttcagtccagaatcctacagggacctcctcatgctttgggctgcaaggactccacgcccgcggagctcagccccagcgacacgccggcagccgggctagctccgggactgcgaagcgcctcagcggaggctcgtccggtagttccggcccctacggcgacgcgcgtcgaattctgggatagtccccgtaccgccgggaacctcgctcgccttcccctcgagccccccgctgggtcgcgcggcgccagccgctcaacggtgcttcagagcagcctcctccacaacattcccctcggcccggccgttcgggcctactggagaccgcggcttgggcctagtctggcggccgcccggcgaacgggcaagtggcgtcgtcgctgggccggcaggagatactcgcgagcaaaccaacggggaaagagatgaaccggccgccacgtccgaggcacacggcccgaaaagtcgctgggagaagcccagtggcggtggtaggcaattcggagtagtcaataaagtttattcaaaacaatgaggaagttgaggcggagaggggaggagaaatacgggataaacagctaccatgttgagagtggcggcgctacccagacaaccaaggcgaccgccatcttatgagggctggactcgcgaggtgagcgcggcggaggcggggaaccgcgagccgccggctcccgggtgacgtcatcgggggggcggggcgccaccttgagaaaggagggcggttctcagccacctttggacccgctcgtctctttaaggtgcccaatcgccgctgaagaccttgagcccagaggcggagaagccgccatcttaggcgaggcagacgtttggctccattttgagtggggcccgaaacttcctagccttccccctcctccgggcaaacagggagttcagctaccccgactcgcacactcctcctccccagccttctcctcctatgagaggaggtgaactcggtgactccaaactacaaaattaataggtggcggcgggggcgggcttcagccggggtagaggcggagtactcaccgcggctcctgttcattgagcaccttcgataggctgggctctttcccacggtctctgcgttgttggttcttccccctgtgaaggaagctctgtgattatcaccaaatgaaggcaggggcttcgagaagccaagtgacttgagtcccggagcagggacgttgaaccttgtgccctgtgctacccgcgttctgtccccaggccctcagtgtagttcctctgtaaagctgctgccaactccacaactccctctgaactcttctttgaccctactgtttcacttcagttcaaatacagttcaaggatttgtttgcacctgtcccacaattttctgactatagcctgaggggaggggagaggaggggggatgagaggaaaggctgagttagtggagctttgctgagttagtggagcttcgtacatatgcttcaagatggcctaggttttctcaaacattctagaaaattctctaggagttatcttactatttcattttcttaaagggtcccattgctttaaaaaggaaatgtgtgcgtgcacacaatttactaaccagtgatggtggggtaggccctggggatgcaatggtgaaaacagggcctctggagtgggagggcatctgccagtgcaggaaacaaagttgcgagtaaacaattggaatagaaggcacagtaagcacacaaataccacctgcaaaatgacctttgcaaaatgcaacatgaagctacaaaagagccttacaagctgcttgcagctgctgtaagaaagacggcagggggacatggacgattaagttcacttaaataaacaagcgagaacattgtactcaaaaggatcaacgtgtacaaatgcatggaggcacatagaaaaatatttactagaagttgaatattgttggaacaaggaaaacagaagagagataggtaggaggtcaaacagtaaagggtcacaacatgaaagattgcgaaatgcaaaagagtttagattgtatgcagttagcaaaaagaaaacacaggtttttgagcaggggtagcttagtctcatatttgtgacttacccagaggatggtttagggtttttttttttttttatgtttgttgttttagagacaaggtctcactctgtcaactcaggctgggcggtcat

SEQ ID NO: 70824 - DNA, 426 bp, Homo sapiens
aaaaactagaaaatttatcattacactttttttttgtttgtttattctcctttgacttggaactggtggcctgacacatttatgtgccaagaggtcaatgttagttcttatatttttgttacaacatgcagtacagaattgagccttgaatgctttcacttcaagtgactaatttgatcctatttcataatggaaaacagctgtttagaaatgtaggcatttccaaacacagaagtttggcatagtgttttttatatttcggtaactacttccgaggtatttgtagaattcggcatttcaatgacatcatgcttcattttcagtaccatggcacagtaattctgaatctccattgtagctcttctttcatactctgaacactgagaaaggctaattgaacaatattagttcattttcatcaaatat

SEQ ID NO: 70825 - DNA, 1433 bp, Homo sapiens
agtagagatatggccatgtaggtgagtgaatccgtagggggtggtatgaagggggaggtaaatggataaaatggtagagggtagttaggcaggtaggttagctgttgggcgggtaggtgggtgggtagatgggaggtagggtagtgggtaagtgggtaggtggttaggtatttagttgggagggaataggtgtggggcttattatttaagatccggcccctccctcaccttgacccggaagcggatgagtgctagcctcacgcagtggctcaggcaggccggtggcaggaaccaggcccgcggtggaggggtgcccttgttgcccacgtgtcccacgatcagttgcgctgtctgccgctcggcctggcaccgacggccccactcggccagccggtccttgcccaggccccccgggaacatgaccacgagctccaggccgtcgccgccaggataggcacaagcctggcacagcgctgacaagtagcccagcatggcgttccattggccgccacacacccaatccgtctggtagccgccatagagccgcggcagcgccgagccggcgtccaccagcacccgggccccgggcagctgagggggcggcggcggcggcagcggagggtgcagcccgggctgcgcttggccatgatggtggaagtggtgagcggggtgatggtgccgaatcggccccgcgcccccggagtaggcacccaaggcagcgggcggaagcggcggttgcagaggcacggagcccctggcggcgcgtggagccccgggcgctagggctgcagtcggcggcagctggcggtgcaagtgctgctgctgctgctggcgcgagaccgtgcgcgcgagttttaggaggtccacgggcaccacggccccgggacagcgcttctccaggaactcttggaagccctggacacccatgcttcgtcggtgggcagacgcgatagcggctgcgcaagcaggataggcgacgatctgggcgcgaagctgggggcgggcgcgtgcgcactccgcggggggcgagggggggcgggaaaaggattcccgaggggaggggtgaggaagcgagggaatgagggcggggaggggaggagaccacaaattggatttgggtagagagaaggggaggggcagaccggacccgggagaggctgggaggataaaagcgaggatgggctctagtcacttctcttttttctcctttccggccgctcttcttcccgctttagaaggggtgaagcctctttcttccacctccgggagccatgttgcctcgtcttctcggtggtacacgctttctagctggaggaaggggagcgaggaggggcggggcggggcggggagaggggcatcttggtagttgtagtcttctctatggccttaggatatagtcgaggaaccagactaccacccttctcagcccttgt

SEQ ID NO: 70826 - DNA, 1521 bp, Homo sapiens
aaaaatacagaaaaaactctcgaaaatcaaccatatgaaaaccaacaacctaattttctaaaatgacaaaaattgttgcctttgggataaactgagtaaaggatacataggtacatagcatctctctgtattatttaactgcatgtaaatcgacaattatctcaatgaaaatttcaattaaaaataaaacaggatacaaaaaaatagcaaaaaacttgaacaaacactttaccacagaggatatacagatcacaaataagtgcaagaaaaaaaatgctcaacatcactaaccattatgggaatgaaaattataataaaataaccactttatatcatcaaatacctattggattggctaaaaaaagaatgctagtaataccaagtgctgaagagcatcagaaaaactggaagtctcgcacattgctgacaaaatgtaaaatgatacagctgcttgggaaaatggtttgttagtttttaaaaaatgttaaatatgcataccatatgatgcagcaatctcatttctgggtatttcatccaagtgatctgaaaacttatgttcacccaaaaagctgtatgtgactatttacgggagctttatttgtaaaaccccaaactagaaacaacccaaatgtcctccaaccgatgaatggataaacaaactgtggtacatccattataacacaaaataagttgaggaatcccaaagacagcctccagagacatgtttttaccatgagatcatacttctctggccatgcttacttagaaacaggtggacacctgactgtagaacagcccaactataggccaggcaatgggctctgacccatttcttggcatgaaaaagatgagcagggacagtcaaattttctgtccctggaatctaacaaaggtcagttaaataaggacctgaaagtgaaagaatgctttgggatcacgagtaaccagtgttatctaacagttttgggaaagcagaaactatgcataaaatgaagccatttgggaatgaaacagaataaaataaagtatagctattagtgatactgcatcagactgaaggttcatgtacttctgctattaaatccccagagctgccttcaatctaagtctaccccttaattctgtctttacaagatcatccaagtacagttccttttcttgggttctgtattagttgtctattgttgttgtaactaattaccacaaacttagtggcttcaaacaacacaaattgatcttatagttctctaggttacaagcctaacatgggcctcactggcctaaaatcaaggtgttgccaggactgtgttccttctgaaggctataggagagatgtgttccctggcctttccagcttccagaagttgcctccattccttggtctgtggcactcttcctccatcttcaaagccagcaatgttgcacctttctgacactgtttcccttttctctgactcttctgtgtttcttctcttctacttttaaagatcctagtgattttacactggacctacctggata

SEQ ID NO: 70827 - DNA, 563 bp, Homo sapiens
ggcaggagaatcacttgaacctgggaggtggaggttgcggtgagccgagattgcaccattgcactccagcctgggcagcaagagcgacactccacctcaaaaaaaaaaaaaaaaaaaaaaggaatgtcttgggtgaaggaaagcataaacaacttttagcttttggtgacctttctctaaactataatgaatttataaaagagaacttttgcctgtcagaaaatctaggcagtgtttaatttgtttaaatgaatacagaacctctaaaatgtgtcttacctttatctgtgggaccttctgaacagttaatggggaaacctggggttgtgaaacaactgtcggtccaaggacatgtacaggtaaaacagtggactgaccttgaaccaaaggcaaaatctgcggctgagtcagctttgaatgcttctgtaactgttaaaataaggggaaaaaaagattaaagataaactttcccatttacagtaaatacactgattatatatttaaaaatataacagttcacctcacccctgaaacttgctggtaatgtcctactagttgctgag

SEQ ID NO: 70828 - DNA, 1098 bp, Homo sapiens
ccgatgcttcttactcctctcctcgatgtctcgagctccgctccgcgtcgtgtgcgcttgcgcgcgcgagcgtctccccgcgagcccaccgggccagctacggccggtaggtaaagagcgggcggagagaggggagcggggtacgagcccaagctcgcgctcggcccggagctgagcagacgcacgcgtactccagccagggaattcggacgggtaggagagaggggcggagggggggcggggaagggaggggagaacagaagagggggaggggcggagaaagccaacggagcagccccaactcggaaccgcccctatcgcagcgaggtgccgagtggccagccaactagagtgcgcgcacgcctcccgcccccctcggcgccgcgggagagagggatgcgcgtcgaggagaaaggcttctccccattccaaagagaaaatctcttagaggaagcacgcgcgacatctcctgtgtgttccgaagcgctctcgctctctctcagctgctctaccctctcccctcagagaagaagaagaagaagaaaagtccaagcacacactacttcctagccccccactgcccacccttgggtctccgcgagcctctgaatgctgtagcgccgctgttaggaggtggtacccgccggcaccttttcgcccgccacccctgactccctttttccaactcccgggatttctcgcgagacccatacctgccggctttgggattagaagtcgaagcaccgatttacaaatactggcctcccagttacgttgcgggggcaacagccacggcatgtctcccccgccccccaggaccgcagtgcgcgcgcgcgggggctgggaaacgaccaaagcagggatgggaaagggaagctatgaaactgatttttgacggcatgtaaccgctaggcctgggcacgtgccctgcgcctcgcagacgggtgcgatgtaccctgggaattgtagtttttcttcccacctatggtccgactcccaccctcagttttacttaggcctctgaccgggagggggatttccgacgccattttgccgggaacaatggccctcggccctgatggtggcaggtgggggagg

SEQ ID NO: 70829 - DNA, 2045 bp, Homo sapiens
tacatggcccctgctctcagggagttcaccctcctgtggagacacagtcacataaacaactacagtattgtgataagtgctagcttagctgtataggtaaggtgctctgggtttctaactcatctgcgaaagtcagagaaggtttcatcgaagtgacaagagttaggtcttagagaaacagagcaaaattgcaaatgcagggggaaaggtgaaagtggtcagggctggtttcaggtccagaggaatttcatgtgtctctaggatgagaggttagaagccctccaacgatgtagagaggtagtgagtcctgtttatgtaagggataaagggacagatggagtcattttcagcccgtctgtgcttgaagtggagaaacaaacccaccctcggaggcacagagttccacctactctgtgccccaccccagggtttaggcttgaggaagaggaggggctggaattaaaccatcaagaagaaaacatttgcagactaatatttactattttgtgggggagacctcacttcccagccagctccttgagatggcttcagaaacccctacttgccccactccagagatataaattcattcccttctgcagacgctgctccgggattgagggaaggatggagtaggaggggaagaaggcaaaagggtgggagaggcttctagtgtgggagaggcttctagtcgttctggctcctgctccagctcgggttgggtatggccatagatctgaacgtatgcagaaaaagctaggagtgctcagggatggtctggggctcaaggacccgggaaggtggttgggaatagctaaccaattcacttcaggtggggaaatactcggccagacacgtgacccaggcggccattttctcacaccctgctgtcgccatcttccaggcagacaaagacaccatcccccacccttgtctgattcgggcgtggtgactgcctggttattgagatttgggagcacgcatatttaaccccagacagatgcccgcagacaaaattttggcttgcaagtaaggtatatggccgcaccagtcgacccgccgcttcttcccggtcatttccccgtcctccttctccctcctccgctatttccttaactacggggcaggcaggaggcggggccagcgtggtcgcgaagaagggacgggcgggcgtgagctgtcagtcagaagctccgcccccccccccccccccccgcggagaccgcacggtgggcggagtcgggcgccgccggcctgggatccggaagtcggagcctagctgcgcgagagtttctgctcgctcaaccgagttgtcgtgttgccctcgcttctcagatccccgccggaagtgtaagtaagaaacttctctcctcttttctcacaatgtgcgctcacctagacggccgggcagttaggatcgtctattggatgtgaaaccagagatgcccgccaacctggaatagagaggtaaacagcaggatcccttccagggtagaagggaccggaagaggggcagggatcgcggcacacgtggagacgcgccgaattgccttttcgcggagtggagtttgccgggagaggggcattgccccatcccacctagaaaggtgtagacccgggacacactgtgtagagaggcacaaacttcacttgtgtggtgaagcgttgatcgtcctcaagatagtgaggcttcattctgcattcaccttgtatagacaggagtcgacccaccaaaggcatgggggacatccaccccaaccgtgtagagacatctccctccacccagctgagcagcgcagacttctcccgacttaaggcacttccttggcttggctctagacagccgtctcgaggcacctcctcaggacagacagaggctttgatgtatctgcccccataccagcatagaggagcttagaaacatttaatatacagagggagggcacctcctccccatacgcgtagactcagagccctcagtatcgctccccaactcacccgtccccaaagtggttgcagttacaggcctcagcttatggacaact

SEQ ID NO: 70830 - DNA, 440 bp, Homo sapiens
cttggtggggagagagagggcctgccttgaatgccaggtccgcagaagtgttgaatggaagggcaaaggcaagagttgttagggttgttgaggctatttgtggaagccgggagagagggaggttaccatgatactggatttatgtctgcgtttgttcaccacccagtccattgctgtctggcttatgcttccactgctctgctgacactgcccctgctggcctcatcagcgccttccctgacatcacattcatgaatagtattcttccctcatcttattggaatgctcagcatttgaggctatgctttctttgaagcatgtggactttcttgtcatctcactctcctggatgtctttcttctttgactagccactgacagtctcttttgccactttttcccctttcttatctttttttttgagatggaatttcaccttgt

SEQ ID NO: 70831 - DNA, 2139 bp, Homo sapiens
ccgcatacacttctctaggagtcttggatgtatatatatggaaatgggattgctgagccaataggatatatacctttaaaataatgttttttaaaataaaatagagagggagggtctcactgtgttgcccatgctggtctcaaactcatggactcaagtgatccacccaccttggcctcccaaagtgctgggattacaggcgttacattaaaaaaaatttaatagtcaaagagctctccaaatcaggcacgaacttttacttatatattaaggtcttactttgaatagggttactaagcctgctgaaataaccccttttcttccggtacccactttcatccgacgtgccccgcccgcccgactcgattgcatcagcctcctgtcagccccgccccagtgtacttgcactcgcaagcgcagctgggttatcttgggactagacgctcacggggcggggcttcgattctcactcttggagcggggaggccaaaagagtcggaaaggggcgttatctctttcggaagtgagtgggacaatggcgagcaagcggtcgtgagccttgagctttgcagcttttcttggctcccatttcctcctaaagccacgagtttaccagcgtctcttacaagtagtgtgtcgccactttaaaaaaaacatcaggaaaggaaaagggagaaccccggagcccgaagctacgcccgcctgcggcaggggtgcgccaattgtccagtggtgagggcgcatgcgaaccattgacaatgacgtaatcttgcagctcacagccggagtgaggctttcggggagggaggagctccggtgagagtaacagggtcggatttgtctgggccaggcccaggctgagacgcctactaggggatggagggccccagaaggagggagagggaggagtcttggactctctcggagaacgaggctggggctggccaccgagagtggaagccgctgtccagaggttagagccacccaagagctggtagtcgagtggccgccagggggtgaccgtgcctgcgtacgtccacaagtgggcccataaagactggcccatatatttttgaaactgtttatttttgtatctgtttcctcttctgccctgacatcccagagaaagagttgtgggtgattgacctttgaatcaccagcacctcggggagggcctggtacaaagaagacacatttttaaggcggttgattgacggaaggaaaagactgaaaaaacgaaaacaacaagccaaaaaccccaaacccagagatacccatacatgacataaagttaaggcctttttaaaaagtaataatagaggagaaattttaaatgtccatcagcagagcttgaggccatgcagtttttaggttgttgcagtcagagtgtacacacaaccctgcatccttagttatggcataataatttttctctgttgctatagaatctccacagccgtcatctctcagcaatggttgtagaatgttccattagacagctgtgccacaattcacttaacccttctcttgttggatattaaaactactttctagtgtttgaccaccaaaatatatctctgcaaggaataattttgtgcttagagcttttcctgtaggagtaggggtgggtggatatcgatttaggagcagaattaccaggaaaatgtcataaacatgttttaggctcttgtcgacccgctttcctgaaagggatcatacccgttgacatcagaagccaagtccgaaatcaaacctggtggactccgggtcttgtctgtctccaggctggttttaatttccgtatcctgcagcaatgcagaagtttattattagttctgacctttggggcaaggcaaacacacaccaaaggttcggggacaactttagcaactgcaacagctgacattgtgagcgggtgcagctcaggtttcaagcttgagcaactgggttggatgaacttgcctcactgagacagggaatctgagaagaggaacaggtttgggagggagcagatgagatcagttttaaatacatttagttcgaggtgcctttgggacatctaaagggaggtatccaggagacaggcatacatacggataaacaacagtttttgcccttctctgaactcccagagctccc

SEQ ID NO: 70832 - DNA, 787 bp, Homo sapiens
ttatatagatttaagaactgggaaataaataagtagataagaatgaatgaacattttgttataacaaagtcactcagttctttgaactccttatgctaaaaatcatatactgattcatcatcaaaattattcataatgatttactagctgccaactccattacattcttcttatccattttgttgaaagcaaataattagaaagcatttggttcacaaaaggatttatttcctactaacacaatcactcactttctcaacaacaaaatcagtatttggaatttcccctttgttggatgcctggaggtttttgacactctgtgactagtgctctagggtagtgtgaggcttgcctttcttttgtaaacaggaaggattgtaaaagtagaggtggtgagggagaacgggtacttgggcaggtcggttttagaaaagagtaagtattgaagctgaggatgtggaaattgattcccttaaaatgacacgttcctatgaaccctttgcaacctctttgtgtgccaccaggagtaaccatcccccagtttgaaggctgtgtgcctaatagacttagtgtaactcctaggtgatcaatatactgttaaagaaaatgcatttggttttccaaagtgttctctcatacatttccttcttgccagtgcccagggatctatttatggctggcaggattgatattgcctgtggcagataaagaacttgtggcccagagagagggaagagtgatttgtccaaaaagtcacagccaatgtttctggtcccttgtccccaag

SEQ ID NO: 70833 - DNA, 1174 bp, Homo sapiens
tccacattgccttgcaagctcccgtcctaatcagtcagacatcagcaagtacttattgaagacttcttggcttcccaacatcatgccaggcagccccatcctctgtcctttccttttccactaaacttctcactcactatacttgtttaactcccgctaatttgctgacatttactgagcactcattgctagtcaatagtgctttatatatcttacttaacccttacaaaaccacaatggggttggtactatgttcacactgttttaagggtctgtccttaaaattgaggatgacagtccaccatagatgaaacacaatttttattttttcaccacagtggaatagaaattataggacatcaggacaccaagtctaggtagtggatttcactctgccttttgttttctaatttcagcaattccaggggttacccttattctttgccttgagatactcagtctcaggccctaaaccaggtcggtataggtcattccagattgaatacagagagctcagtttcagagtcaacctgtgtctaagcaccagctgacctgagggggaaacattcagggtggcctcaggtcagctttgttatagggttgtgaaattcgtgcagggcacaaagttgcagagtcaaaagtacaagttggggctgaaatccaggctatgctctacttgtcaagtcccacccacacagggctgcagccatccaaaaaggaggctctttccatattcatctgtctaaatgggtcacctttctcttaggtacacaagaccatcatataggctgccagatgtcctggtaatgttctcagtctctgttgattcattttgtcaataatgtaaatgacgtgtactggttttcagttttagaatcaatccatatacaaggtctggtagacctagttatatttacagaacagaataggaatgttatcagcatcgaaaatgtaacagcaaaacaatgactgtcagaaagtgataggaaaataaaaacctctaatatcttcatcttatgtagatagaattgcgatactgattgccagtgatgaaacaaacataaatgaattatgcttttaaatcaataagttagaaaacagttaaacccccgggcacagtggctcacacctgtaatcccagcactttgggaggccgaggcaggtggatcacgag

SEQ ID NO: 70834 - DNA, 1589 bp, Homo sapiens
agggggggtggcagggggctgcggaaaggggctgggctgggttgggctgtctgcagctctagtccaggaggctgagacttcgagagggacttagagaaggcagacgcatcccgaactcgctggaggacaaggtgaggggcgttgatattggggttttatggaggtcagacagtggttccagacccctcgaacccatagccaggcagatgagcaattcttactgcaccactgcagctgaagcagaggtgacctggagtggggtgtaggcaatgaggacgactgagaaagtagtaggctgtacagactgggagcagagactagcggagggaggaggggagaaaaacggggaaccaggaatgttgggagggggacgaggaatacaaggagggaggggaacactgagggggagtgaagatccagagaagagaatcggggatgcagagagggattaaggaatactgaggggcagggtgtgcaaacgtaacacggaggaggatgtaagaaatgggaagaaggaattctggagtaaataggaaatgtgaggtaggaatagggagtagggagccaggctaagggaatacggaggggggcataaggaatgaggagcagggagcgggggaggggcagacaggctgggacggaggccccctagggaggcggaaaggggcgggaccacttccggcctagagaggggagggcagtctccgagtttcggaggggcttggagtgagtggacgcactcgggaattgtaggaggacgaggtgagcagccgggtcggcttttggatgagagccccgctaggggtcggccccaccctctgggatctggagaaaacctgccttaaggaccggatcgtaccggatccatccggctgggaagggaggggactggacccggtttggccgggcccaagatggaatcactagctcagtatttatttgaggagggggtgtaatagggaaggggcggaaccaagatgcgcctgtttggaggggggcgtgttaggaagaagggcggggccaagagacactggactctgtagggcgtgagtaggggaggggccgggtccaccagacactgcgacaattttggaggaaggcttgttgggcagggggcgggaccgaatggtactgcggacctggagaggggcgtgtgttggggcagagtgccagactgagaccacgaccattgcgcatgcgcactatgtttcgctagaaaggggcgtgttgagaagggccagcactgagaagagccagctgctgaatgcgcatgtgcacggtggacatcaaagaaagggctcgtgctgggaaagcgggcggggctgagagcggccctgcagccgacgcgcatgcgctctatcgacctgcggctgggtggggggtgcactgggaaaaggggcggggtcctcagagctgccgcgctggcacatcttcctggagaaggggagggtgcggctgcagagaattgagacttagaagctttgaattcctgtatctgagaacggagtcgttgggggtggtggagggggttggaattggggacctacggaaggtgaggatcagcctccaggcacaacaggggagaggac

SEQ ID NO: 70835 - DNA, 2735 bp, Homo sapiens
gaagcattccaaacaagctctgcataagaaaggaaaagttcctaaagatccctctgattaagatggtcttaacctaatcctcctttgtcttcatctctctttccgcctgtcttctctctcattcttttcctcacgtttttgacactagcctctatttcatccagttgttcatctattccaacttttaggttgaggtaggagtggatggcaaggggaggtgcatcctttgctcttctacacccactctaccaccaccacctttaaacccacggaagcaaaccccacttacagccccttctccgttgcagcctgctgctgccgctgctgtgtggaatccagatcttctgcaacctggtttgggtgagctctcccatctctggagacatcttaggagtcgcaccgaatgacatcactgcccacaaggtacctggcctcacttcctatcttactagctgtcttttctctcgctgtggccacagcagcaggtggacagggctgggacagggggtgtactgggtttctgagccctctcaaagtctgtcttcagtcccctctcttctttcctctggtcctagcctgcctctgctcctgtatgtactagtggggtattgggtgcagagggcgagaggttgggcagaggtcaggagaggcctctgaactccaagggctgtgtacataggaggtaagttggagcccaacaaggaaggcagccagcaacacagcccaggtctgaccagtcacttccctccaatgaagacaagactaatagagtatgcaaataaaagaccaaagatcatgtgcttacagcctgtgtggggtatagaggcaaaggtgatggaggtaggtctcagcggctttcccagctttgaaataaaaaaatgggcccaagtagaatgtcaagctccaacccagaaaccaagattcacatcagaaatgcaaggttcccaaggacaaaaacacaaacacaaagtccctactggggaatgcagtgttttgagctggcaattagaggcccaaactggacatggaaggtccactacttctctgcttccccgacccaaaatggcattgcatcccttgtcttctctggattctgctgccttccttgccacagggcctctcccacctgaaatgtgctgcctggagcactcttgaagagatgggcactatccgatcatctttctactctctccagccaagggctaaataaataggagtaaactgacacctttggaagagtgcagccattgcctggggctggaggtgggggaatggtaagctctgcccacatggctgttagccaccatcagatgccctaaggagaatgacactggcatcatgaactgatagaaaatttcactaaagttcctcatgccaagctattaggatggagatttaggagggtggaggctgcagcagggaacagagagcaatggcctcaaagtaggacaagtccataggccagagtcatccagcccagatgactcactctcacctgccctctcccgctcccctgacccgttgttttgaggcttttatgtgtataactcatagaactgcacagcttgcctcgaagatgcacaagtgtcctcttacttcactcttttgcaaccttcccacccccaatgaacctccaacgattggctatgaagaagctcaactttcttccactgagctgggctacacaagggcaatctcttggggacagaaatttccaatccctgccctcaaatgctctcagttccactttgccttttaagaagttccctaaaatacatttgcaagccgtagtctacacaagggtcagattccctccagttgttgtgtataaatcataccaaatttttaatacattccagagcccacctatctaaatgaatcaactgagatagcagatcatgatggttaagagcaataggctctggagcaatatttcttgagtggaatcctacctctgccccttgttggctatgaggcaatgagcagaagactaaacttttcagtgcttcagttttcttatctggaacatgggaatgataggagtacctaccctccttaggactgttgaagattcaatgtgttaaaaaatgtaaagcaatctgtgaaatgttaaaaatatattatctaacactgttactccctttgggaggtaaatgatcagacacctccttgactaatctgaaacttctaatataatgctgaccatacagaaaactctcagttaaggaaacttacaatattatgggaaagggttaacatttataatacacaaagagctcctgcaaatcaattagaaggatgaatttggttttactcttttgattttgtgtaaagacttgcaagatcatttcatctcaccctctcaggtaagaaaactgaggtctagaaatattttcctaaggtcatgtagtaaatcagtggccaagtcaggaatagaacactagggacctaatttctcccaggccagggcttttctttaattaatcaaacaagcctgatctaagaatgtggtcttacaggttagctcagaacctctagagtctcagaactagactttgtaagagatacaactcttttaattctaataaatttcctaactggtataaatctgttaatattaataatcttaattataaccctttccctgtatgttttccattgcccacaaagcaacaacatattccttatcttatttgatccttgcaaacatccttgttagccttacagggaaactg

SEQ ID NO: 70836 - DNA, 1699 bp, Homo sapiens
cctctgtgcctgcaaaacagtgcccacctctgtgcacccgcttcctccctgagtttgcaggcacccagctcaagatccttcgcttcctagttcctctcgaacaaagtcctgtgttggagcagtcgacgctgcagcacaacaatcaaacccgggtacagacatgccaaaacaaagcccaagtgcgctcaaccaggcctcagcccagtcaggttggctctagcagaggccagaaaaacctgaagagctactttcagccctcccctagctgtccccaagcctctcctgacatagagctgcctagcctaccactgatgagcgccctcatgaccccgaagactccagaagagaaggcagtggccaaagtggtgaaggggcaggccaagacttcagaagccaaagatgagaaggagttacggacctcattctggaagtctgtgctggcggggcccttgcgcacacccctctgtgggggccacagggagccatgtgtgatgcgtactgtgaagaagccaggacccaacttgggccgccgcttctacatgtgtgccaggccccggggtcctcccactgacccctcctcccggtgcaacttcttcctctggagcaggcccagctgaaccaatggaggcctggggacatctggcatggtcacccctgcacatgatctgaggccagctccccttccctgagctgcctcctgcttctccctcaaagtctcctacccttctcttcctcttttaagccctctcttcctcgctttccttcctacctagctccttgttggtgagcttcttgtgccttaatcctgtgacccagccccttacaccactttccaccttcctgtccgaagtacacggacactagctgccccaggaagttgtgtgattttaaatcacttctgtctttgctggaaagtgtatttgtgcataaataaagtctgtgtatttgtttcagggttgcactttggacattgtggaggtactccataaagttgagtcagagaagctatctcaatacttggtttgccggctggctgtagcccaatgatgtaattcccagagaaaggggaggagggaggggggaggagggaatagtgaggcgtgagcagcagtgctcaccataaagggttctctgctcagttgtaggaatttcctgtacggctaaggtgaaatcagcaaggaaggtgggctgtgtagccttaaaccagagctttccagctagtgcgtcccacagctgccacagtgggttacagggttgaaagaaacggtcctcagccctcagagttgccaggcagggcctgggaccacacaagtttcagggacgattgcctccttagcaagtagtatcattagtacccctaagtgtgccatggaaatgtttcctgtatactgtgacctggaaagtgggagcattgctttgaacacagtgcttgctctagccaagcctcttctcacctttgaaaatgggactggtagaccaggcacagtggtgcacgcctgtaatcccagcactttgggaggctgagatgggtggatcacctgaggtcaggagttcgcaaccagcctaacatggtgagaccccgtctctactaaatacaaaaaaattaactgggcgtggtggcgcgtgcctgtaatccaagctacttaggaggctgagacaggagaatagcttgtacctgggaggcggaggttgcagtggg

SEQ ID NO: 70837 - DNA, 1055 bp, Homo sapiens
tgaaattcagtctccaaaaaaaaaaaaagaaaagaaaaagaatgggactggtaaatcctgttctgtgggatgccgtgggagggagagaggataatggattgaggaagacatccatatccccttatggaaaatacctctttggttttggggaaccactcctttctagggaatttggttagggctgactcatttcctggcttcaggggctaccctgggcccagatttccagggcccggattaccagtgaagcgtcaatccctggatttttattgaaaccattggagaagagccatctcaaataaatctgccaagtatcctagctctttgcaactcactgtgtagtttttgggcatttccttcctctttctcattctgtttccctgttggtaaaatggaatggtgaccaacaagtgacctatggttacctcatagatctgccacttgtctgagggagtcagaatgcacttgtctgttccctgtccaataaaaggcttcacatgctgtggtttgtgctttatttttaggctcaattcagctagaggcacacaacaaagcagaagacaggagtaggcctggacccaagtgaagcgcaggtggggtgtgaatcctaggcagctggcttctcaggcataggtggtgacatactggggccccatgttcccgaagtaggaacgttcccactcactcatgagctcaaagtgtacaggacggcgacagaaattgcaggcagccacagacacatcctggaggggcagccccaccgcagtccaagccagcagcagcttctctgaaggtggtagggggaggggagggaaaaaatgggttagactagatcttccaaatctgtcacagtacagatgagccaagatattgatccccctcaacccttcaagatacctcagggccagaagtagcctactgtttgcttctgtgtgtgccgtgaatattaccatttgtatctggatgctgggatatatattataaaagatttggaagctctcctttgacacaatttgaagccatactgtcctggcctggaccactccctaagtata

SEQ ID NO: 70838 - DNA, 1393 bp, Homo sapiens
tggcatgtaaattggagagtatgggtatagcatggtgtatttaaccatttttaaaactaaagattaattccagttcttctagaaggtatttcaaatgcagctgcaataaccttgacctccaactctttagctggctaaccatttgtcactttgaaaagtgagctcaaaggtcatcacttctgggaggcccttttaaacccccacactggatcttgttccctcttctgggcccccacatcttctctctcagaatttatcacactgtactactggcaccttgtcttatgtcttcctcccacatcagaccttgagcaacttgctgacaggaatctggaaccattgactaggggggctgtcagaaatgcctgttgcattcagatgcatttcctccgttctttctactctgttctgcctgtacccagaaaaggaactggaagaataaaatctactgaggttaacaaacctctgaggtgacgtagagaaaaactcgaagtgccctaatggaggaaagtgtgtgggacttcccaggtcattgggaaggatacttaggtggtgcctctctgtactattcctggtccagctgagcccgtgagtgtaggtggctgtggttgtgcctgatatctcctctcctttagaggaaaatgtctcattttctctttgggtggtggttgtgtgattctcacctttttatgaggcaatgtagtctggagggagaagtaagtttcagtcccatatgctcatgtagcgtgtccaaaggaaacactttcctggcccttctctacatagtcccctctctctctctgcattgatttgttctgtgtcttggctgacttcctacccatgtgggaattcctctggaatcagagtctaggtctgattcatttctgcaaccccagtgtcaacctgacaataagtaactattcagacaatgtttgattgaatagacttcggtgacttaggagtttcaactttttactttgcagttgcactgcagtagacatcatggtacttaaagttttctctgcatcttaggttattttcttagcatagattttctaaaagtttatttataaaccataaaactcacccattttaaatgtgtaattcaatgattattagtatatttacagaactgtgcaaccatcaccacaaatattagtattgatttttagtaatgggattattcgaccaaaggatatggatcttttaaagattttttcctacattttatccaatatctctgtaaaaggttgtcccagttaacgatagtctcaaccacttgtgatgagtggggattaaggaagacatacaggctttgttgggttacttcctgaagggttggtctcactatcagcatctctctccttcattagctatatcccttacccacatt

SEQ ID NO: 70839 - DNA, 1540 bp, Homo sapiens
atgaaagaatacattgataaaggtccatagaaccccagtaacacgtggagaaagatgacaaaaccaatcagagaaacagaaataccagttgctagggtacctagcagcctcaccgaggaaatgccaatttgaaaaacagaatgctattgtccactgactgagttttcgcgagggaccacatccccacctcacccccgcctccagggcttgtaaggcactgacaaccaaagaaccagcatgttctttcggagaaggcttcgcgggattttttttcaagcacgaagggcggggcacgaggcaagcagggccgcgccaccggccaacactgtcacctgcaggtcatgagagccgagcgccaccaaccccggaagaaaatacatatccgctgcgtttccgccctgagccccgagatcttggctgagaaagcaaagcgtgatgaccgtggggaccagagctcggactggtaccggccggaaaggccccgacgaacttaccgtacagggcagcctcccatagtcctgccctcggaaccatagcaaccgcgcaggaagttcctgcgccgccggaaaaacgcagcccggagggcggggctggccaaggattgacgggctctgggcctgcgcatcggagcccggggaggtcggctcctgtttcctctgggtccgccgcaggctcccttccctgcagttgggagctgacgcctgagggacgatccgctgagggtcaggctctgctgcgcgactgcccgagccgccccatgttcgagacctgtgccaatcccatggacattctcctcccacccagccagcctctgaacacgcttctcacgtggcacacgccctgtcctcgcagccctcacaccgctgatcctcctcggcgacctcagcgcccccggggctgaccaggccgtggccggcgcctctccgtcctcgggggggtctccttccccccacttaagtctcttctgcccgcggtcatgccctgggcctcaggaaagaccgcgcccctccacgatgtccatttcttgcatcccccattctcataacgggcagcacccgatcgtgtcctaacagctacctcttccagtgccccagcatccacagcctttagcctcaaggaggcctcctctccactaaccacaaccgcgttcctcaccattcaccttccttagccagcttacccaaagctattaactctctcctccctactctcctggcagtccccccgccgccaagtagacaaacaatgtacaccctccacaagtgtaccttctctgtctagtctacttacaagatccctccacaagcaccagcacccaattttctcatgatattcactgatattcccttgagaaaatagaagcaatcagagaagaattcacaccacttcccaacagcagtagacctgcacttataatcttggctgcttccctggaggaagagacaggatcctacttgagaccaggcccttcacctggatcctatgccttccaccttcttaagggatcatcctttgcagttatgctttctcctgaattatc

SEQ ID NO: 70840 - DNA, 625 bp, Homo sapiens
cacaatttatccagacatctttagtcatagaggaggaaggcagtgacaatctgacatttttttctctggcctatattacaaggcacaagcttcagcttgcagggcctcagtaaagagggagtagcaatttcattgaggaaaagtcagaaaaataaaagaaacatttgaaagcattaggatggggattgtagccctgaaagaattcaggattcagtccaaattgtgtaaccacccaatgggttcttgcccaaattacaagtccaaattacttgcccaaattacacaattccaaattgtgtaacttgcccactgcctagacagagccaatttatcaagacagaggaattgcaatagtaaaagagtaattcacgcagagctggctatgtgggagactggagttttattattactcacatcagttttcctgataatttggggatcaaagtttaaggataatttggtgggtaggaggtcagtgaatcaggagttctgattggtggggtcagagattaaatcacagggagttgaagctgtcctgtagtgctgagtcaattcctggatggggcccacaaaaccagatgagccagtttatctgggtggtgctaactggtccatcgagtacagg

SEQ ID NO: 70841 - DNA, 486 bp, Homo sapiens
atctaactgtaattttgtagtcctttaatgggatgtgaactgtagttcagttcatgacttatggaggatctcaaaccatatctcttgaactgacggatgggtggagtcatgacttcttgcatgcacggacggatgtaaattttaagtctcattttctctggtgaagtcacaagggtgctttccagcccatgttaaattagctttataatttattttgggacaaaagtagtatgagtcactaaaaacacagtgttggaaattacatcataaggatattgactctgcagaattgtcccatcagaagaatgttatgatctgtgttgagtgcctgtcagaggactctactaagagctaggtattcaatataaaccactatgcatcatgaaaaataaagatacacatctgaatgccaacatactttgcatgtgctctaattcctatgcagcaagtgtgaaaatggtattcatacaatcacacaaaggagtg

SEQ ID NO: 70842 - DNA, 841 bp, Homo sapiens
acaaattgattagtatacacacaaatgccttctgaaaacagggcgagtgaatgaacgcgctgtgtaagccaagacaggaaaggaaggctggagacagctgactccttccaagaatacaccctcccgccacccctggcctcccaacccccaacacacacacagcccgtcgtcagtgggaatggagccgacgcactccttccctagaccgtcgagccaatcttggaatgtttgtagtaggctgaaaatacagaaactttaagctatttttttctcttctgcaaactccaggcccctccaatctctagctgtcatttctgcccttgtcccacccctgtcgctgcctgccccttttcctatctgctagcggaagtccctgtggaggaccagcctacttcctctttggtgctaggagtgtgcgtggcaggagaggcggggccaattttgctgagctttctcgcgggcttgcagctgcggcaagtgctggcggcggctgctcgcgcaagtcagctggcgtgggaactaccctttgtagctgagaacggcttgtttattgctacaaagactctattgacattggtagcttcagcggcagcagcttcttacggtataaagctgttgcttcctgaagaggctacaagcatccttccctaggactgctgtaagctttgagcctctagcaggagacatgcctcggggacgaaagagtcggcgccgccgtaatgcgagagccgcagaagagaaccgcaacaatcgcaaaatccaggcctcagaggcctccgagacccctatggccgcctctgtggtagcgagcacccccgaagacgacctgagcggccccgag

SEQ ID NO: 70843 - DNA, 516 bp, Homo sapiens
ttcacccgacagcatttcccctttttctggacagctccggatggctggaagagcaccattcattacaacctctgcttcctggacagctttgagaaggtgccagacagccttaaggatgaagataatgcaagacctcgctcttgcctttggaagctcactaaggaggggcaccgccgcttttgggaggagactcgtgtcttagcctttgctcaaagggagagaatccaagagtgcatgagtcagccagagttgttgacctctctctttgatctttgaaatgccattgctcccttttggaacactgccttccttactgtgcctacttatcccctgacattcattaatctctaaacttacccagcctggttggtgccaagtctgtctttagctactgttacaataatggtgttaagtaaagttagaggtgggtacaggggagacagaacttaaatccaggtggagagtcatggaaagtcgcacgaggagagtggctgttgttccaaattttgagcaaag

SEQ ID NO: 70844 - DNA, 639 bp, Homo sapiens
cttcgctctgacatagcctacccaaatgagatggaaccagaaaaacaattctggtaatatgacaaaaccaggttctttaacacccccctactgccagttacactaactcaccagcaatggatccaagccaagaaaaaaatccctgaattgctggcaaaagaattcagactgtcaattattaagctaatcaaggaagcaccagagaaaaatgaagtccaaactttaaaattttttaaaagaaatacaagatatgagggaagaaatcttctgtgaaatagatagcataaataaaaaacaatcacaactttaaaaaataaagaacacagagaaatgcgaaatgtactggaaagtctcaccaatagaattgaacaaacagaaaaaagaacttcagtgctcaaacacaaggttttcaaagtaacctaaccagcaaagacaaagagaaaagaatttcaaaaatgtgcaaagcctccaagaagtttgggattatgttaaatgaccaaacctaagaataagaaagtggaaatctaaacgttaggaaaacatatttgaaggaataatcaagaaaaatttccctggccttgctagagatctagacatccaaatacaagaagctaaaagaacacctgggaaatttattag

SEQ ID NO: 70845 - DNA, 1731 bp, Homo sapiens
cacacttcagctagcctgagagggcattttttagggtccctgtcaacaagaaggtttaccattatttttttccctgccaatatgataagccaaaagtagaattttattgttttaacttgatttctttttattagtagtgaaattaatcatccttttttaatgtctattggccatttgcactccttttgtaaaatgcacgctcctgctctgtcttcttcccttcccctactggaggtgttcctcttttctttttgctttgtcagagttctttattattcatttttcgtcttatacgtgggatctgttcgattcaggctttcacccttttactgccttacagattgctaatatacattctccattggtcttttaatgtcgtttacagaagctgactctctaccgcctccttctctccgtctcaccctctctgcctcgcctgctctgtactgttctgttctcttctctctctccctttgtttctctctctcccttttttcttttcagtgcagaagtttttaattttgaccgagccaaatctatcaatctaggcctggcgccgcgtcagcagagggggcggggaggcgagcgcggaactgggggaggggaaggggcggggatcagcaggcggagcggctgccagagttgctgggagtgcgcgcggtcggatcacaaggcggcggcggaggaggcccagagaccggagcgcggagacctcagccagcggcctacgcccaggcctttctccaccggaggaccagggaaccgcagtcttcatcacagaggtaccgtgctccgcgctccccgcctgacccggcccagcccgctgcggcggtgcctccttccttcctccttccctcgcgctctctctttcgcccgcccgcgccttccctgcccgcctgcgtcaccgcggccgccatggctgagaatggcgagagcagcggccccccgcgcccctcccgcggccctgctgcggcccaaggctcggctgctgccccggctgagcctaaaatcatcaaagtcacggtgaagactcccaaagagaaagaggagttcgcggtgcccgagaacagctcggttcagcagtttaaggaagcgatttcgaaacgcttcaaatcccaaaccgatcagctagtgctgatttttgccggaaaaatcttaaaagatcaagataccttgatccagcatggcatccatgatgggctgactgttcaccttgtcatcaaaagccagaaccgacctcagggccagtccacgcagcctagcaatgccgcgggaactaacactacctcggcgtcgactcccaggagtaactccacacctatttccacaaatagcaacccgtttgggttggggagcctgggaggacttgcaggccttagcagcctgggcttgagctcgaccaacttctctgagctccagagccagatgcagcagcagcttatggccagccctgagatgatgatccaaataatggaaaatccctttgttcagagcatgctttcgaatcccgatctgatgaggcagctcattatggctaatccacagatgcagcaattgattcagagaaacccagaaatcagtcacctgctcaacaacccagacataatgaggcagacactcgaaattgccaggaatccagccatgatgcaagagatgatgagaaatcaagacctggctcttagcaatctagaaagcatcccaggtggctataatgctttacggcgcatgtac

SEQ ID NO: 70846 - DNA, 856 bp, Homo sapiens
aaaggtaaacttgaatttcttctcatcttaaaattgcataaattatattaaattctcaataaatttatttacatttagtgggggtggggcgcgatggaaaaacactatattaaataacgacatcggtttttaacacccatcctaatagaaacattaaaatagaatggggtagggaggaggggtggaggcggagaagggatgtacgtctcaggatacaggaaatacggtaagagcgaaacaggaggaagccagctctgtgcctggaggggactcgccgccatctcaggtctcttggctttgccagggcccaccggagaaaactgacgacccgtttctgtaatccttatgggagaccaaccttgtgcctccgggagatccactctcccacctggaaacgcacgggaagccaagcctccaaaaaagcgctgcctcctcgctccgcgttgggattatccggaaggaactcccaacggaggtagtaccactctaccctccgcacctcctcctgcatcagccggcctgaagtcgcaccctcctcctccggagaagtagagaaataaatttctcccaccctaaaccaggtcagattctttctcatctaggacatctaggctctttgaaacttatttatgcattctcacaaatttccttccccttttccctgttctttccatgatttcaaaatagaaaaaataacatgcagggattaagcagctctttcacaaaatatgcttgaatgaaatgatggatatttaacgacattaaataattatttgtaatattttagatgaaataattgtagttatattttctaagaaatagacttgaatcttttgatttgcttgaaagtaagtca

SEQ ID NO: 70847 - DNA, 1219 bp, Homo sapiens
tgatgcattacatttacttgtcatgtctcttcagtttttaatatggaacaattccttgacctttctttgtcttttatgtttatagaaaaacaaacttagtttctctcattatattctcacaaccccacttctgacactgattgtgtggaaaaaaagtttttctttggctcttgtaccacagcaaccaacacagaaagcttgtgaacaaatgtattgggattttttctcaccgacaggcaagtaaacaattctgcagtggacaccagctgggtgttctccaatccaattcaattctgaagctatctccctacagaaagtatcagatcccacagattgagggcttagtcccacgagactgcctcaactttagacatcagtttcaaatctgggcctctggaacttttaactgaccagcttcaagttagggttcccgcaacctctctctttaggctcaaataatttgctagaacaacacacagaactcagggaaacacttacttacatttacccattaacagccagatgaagagatacatagagtgaggtctggaaggctactgagcacaggagcttccattcctgtggagttagggtgtgccaccctcctggcatgtggatgagttatttgtcacctttctgaaatcctccacaaattcagctgtactttgtcctcttgtgctttttatgaagactttatctgataggcactaatgaagcatgaacaaccatgtagaaatgtgactggactaaagggtatgatctaataccaatagacttggtggagaaacccagcaaggcttgtctgttcagattcttcttggtttctctgtgcagcattccttcctcctgggtatggggcaggactctttctgaaatgggagtcttatgacccacagtcaaactaggtaggtcagagaatttctttacgaccagctccaagccagaaagctgggtgaagattagagtatatttttagtttctatggcttgcctttgggagaaaaaaaaagcaggtaaaaggagggcaggagaaagtcagagagagattctgttttgtgaagcctaaagtgccccaacattatacatatatatgtgtgtttgtgtgtgtatatatatatatatatatatatatgtatgtatatatatatatttttatatatatatatatagagagagagagagagagagaaactgtctctcacttttatttctctgaagct

SEQ ID NO: 70848 - DNA, 1808 bp, Homo sapiens
gtttccagttgagcagtccacctattttgatgacctccatgtgtcagcccaaggcggtaaactctacctggagctccaggctttcgtaggacccccagtcctgcagcagaaccttgtgtaagccagctgggtgaccagcaccttgtcctggggcagtagccctatgatcctagtcctcctgtggtgtcccagtaatgatcatgttttttgttgtttactttctgcacgggcaagagccatgaaacctgcagagagccaaaggaagggcaaaggctggctccctaaacaggattcccacaggatctccagcctactggtcctggtccttggtcacacggtcccatgagtttggtgatcaatctgggaccaggtgactgattcctttcactcctctgtctttttttttgtttctctttcctctttaccttttttcacatgggaaaaggcggaggccctggagttgaagtggcagggttacagttgtagttggcgtttgtggagccatactgccatcaagcggaaactgtatctagaaaccggaggcagctgggcacaagtgctggggaaaccccacgagcgcaaaagagatggcggcatggagcccccaggctgaagcaggacaagagaggaactccaagctggcccttggcctgtgctcattcccaggatgcctccctggttccacagctctctccgaaaaaaagggcaggtaggggcgacccaccatgggttcccctggtcatctccaggtactgctggtcctgggttgccacgtctccagtatcccgaagctcctttgttccccgggaggatcggggcccccttgccaacacgtggctccagccaagggaaccccggaactccccacaaaagacaccagagtaaacggcccccgtctcggccagtggcttcgtttatgtccatctcaacatggctgccgggccagctccgccctctgggctgactggtcttggggctgcctggctgttctgtcctggggcctctagagtagttgcttctccaaagcgtcccaatgccaggtacacttccttcaagggctcagaaccccggtgggggaaacccaggcttagacatagtctaagcacatcctcgctgatctctgttcctggcagaaggcaggtgtccgtgcatcctgttgtgttcagaaacaacttccactagatggcaatgtggctccacaaacagcagtcttgtctttcccttcccccattttctttccctctttctgtttttggtgccaaaaaccaaaacaaacaccaaaaaaaaaaaaaaaaaaaagaaactggcctaggagcacccatctcacctacagcagggcttcccatctatgtggtcactttgggggaaccggcaacagtaggatggggtaggggtgggggccacagggagcagggcagcttcctggcccaacaggcctctgtgcccacgcggtgcagacccgggcttgaggggctgatgctttctcctggctggtggctcttcctctgtgaggccacaagaggccactcatagtgctgccagctgtccatctgaggcactttgcattgcagttcgctgtcaatctcattgctcactgattctttgtgtacttttggagtttttctcccttcacttttttcttcttcattctctttactttttctccacttctgctccaggagcagactggaaggcagggtcagctgggcgcggggacaccgttagggaaaacaggcttacttttcctaaggaaattagtaggactctagctgacccctgcgaggagaaattggcgtttccctctcctt

SEQ ID NO: 70849 - DNA, 568 bp, Homo sapiens
aaccagaccaataaacaggtaacctcacatgggcacaggggttggggctcaagcattctcacacttagaggtaaacaaacacacaaagccacaggcatgagactgcccacactgtctcatacgggctcttaatctctgacaagcaatgggctatgggcaagcattcctggcttcaggcctgggtcctcatgccattgattgggcaacttggctttctcccaaaaatgaatgcgggcaatcttttatcagaaaggccacagcagcagatgtgaaactggagcatcctgggtcaacccgcttaaaaacagactcccctttcagatagaggcagagagagtcctgttgggatccttagccctttgtgatgtcatgggaatctgtggcaacgtggtggcctttttgagtccccctaagccacatcctcccacccctgcctgtgtgaaagccaggacagcctgtgcagagtcagacttgcacgagttgctgagtgtgctttctaagggatacacctgcctcaggtcctgtggctccctgttgagcagtctgcccgttctggtgacctccatct

SEQ ID NO: 70850 - DNA, 1413 bp, Homo sapiens
cctgcgaagaggagcacagttgccaggtggaccgagaaaggaaattaacaaaatcaatgcataacacggagagctttttctcctaatcagcgcacccagtaaacccacacctgtttttcccgaaagctagatagcaaagctggaaatcaaggcaccctggctgagtgcctgcagtaaccttcctccccagctcagtctggctaagatctgcggttcggtgaaatacgaagcgtttccccattcccctcgccctgcttccaacactacccggccaggaggcgcagattccccaccgtcccggattgcgggcctcaagtgcacaaatcggacacctcgccgttgcctccgcagtgagcctatggaggaggaaaatcagcgggcgagcagcccggtgcttgcaaaagctgggagaggatgatccataggcaatgagtgtctctaagagggcggcggggcaggcgaagatgaccgtggcggcgtcccttgctcttggctcctgcgtcctccgccttcctggtggcggcggcggtggcggtggccgcagcccctctcccacatcggactcccactagtcgctgctgcgccgcagtctcctccttctttttctagcgcagcttccggtcagtagagaggcctccccttcctgccaaacaccgcgtggcgcccctcccccaccaacctgtaccacagccctgggcgtggaaggtgctcctaggctctcggtctcgcagcttcctccaaatcagaagctgtggagcccacaaccacctctctctcactgcattggtttacctcttctggtttagcacgcgcccctcccctcacctaacctcaaccctctgcgcccctgccccttctgctttccacctttcaggaattagccctttcctttcccctccctccccgcgtccccccaccctccattgaaggggatttgtggtaggacaagagaaatgcgctactgctcagtgttcaggctgccatcttgacccaatctacgtaatttttactgacttgtcattcccagacttaacttcttgaggatttcttttcttttcccctgattgcaaaagaattgcatgcacaatattgacactgtaaaattcagaaaattgacatgaagagaaaataattaactaagccggcctcccattttccagggctcacagtgaaatattaacactatttccttttccttttttctaagctcttacaaagcttggataattttgaatatgcactttcatgtcctgctcatttccatgtagaataaacatttgctcaattttttagatattttctgagaacatgttttgtagtagcttcataaaattaagcattaggatttttcataattttgccgttgcctcctatcttcagacgtttaattgttaaatacctataaattgtgct

SEQ ID NO: 70851 - DNA, 1094 bp, Homo sapiens
cttatactatttaccataaattgtgctaaatgtttttacttattatctagtgtttatggtaaccctttgatataggagtagttattcccattttttttcttatgagtaaactgactaggagatatagtgtaggttggccagggctacacagtagcagaactggggaattccaaggccagtgttctttcttatgacgcattttctgtcttgggttacaacagcactaacgacaggtagcattgcacacaggcagctgctgggaagtctccgcccccatctctggctaggagccctgcaggtgatgataaacaagctcctgtggaattgtgggtagacactggacttgtaaacgaaaagcttcataagtccctctttgcttagtacttttctcgtcctttccccagggtgcacgtaaccctcaagcactaggaccgtgcggaatccaggctgcgatggcaccttcatttaccgcccgcattcagttgttcctcttgcgggcgctaggctttctcataggcttagtaggccgagcagctttagtcttagggggtccaaagtttgcctcaaagacccctcggccggtgactgaaccattgcttctgctttcggggatgcagctggccaagctgatccgacagagaaaggtgagaatgcaattcagaagaggctggagggacaggtcttttagcaggatccaggaagcttagtggtggcggtggttgtggtttcctttccattctctactagggcgacttaggagaggcatttattggggatgaagggagacttctgggtgttgtagtacgtttatttttaccaaggacatttactgtgggcatgggttggactattttggtaccgtcatagtccttcctatccatttgtcctatttgtgcataattactgtgtgtggggtaaagcaggtgtgaatttcaaactgattctcagctatggaaagtcagtctctctctttctctctccctctccctttctctctctctattcttccgtctctcacaggccccagatcaacctgctgcttaccattcaaccaattctttttaaaattgatttaaagtaaaagtagtacttgg

SEQ ID NO: 70852 - DNA, 784 bp, Homo sapiens
aaccgatggtggaagggcaaaagttggtttaggttgtgcactgtatagggagaagccaggagaaggttgggttttttccagatttcagtgtaaattgtttcatcctccagactttgaatttctaggctgaagagtgctaacctgttttggccgcatctctcactcattctaatgtctgtatcagcaagacaaaatttgaactatgcggcaaattgtaccgaagactttgctcaagataattgtgaatatggaagttgtcccgcggggaggtgggaaggggaaggacattttcagcagaactgccagcgctatggtggtttaatgctgacacagagacagttttttctctcaggaattgtctttcatccatcagtccagccagccagccagccagcaaattttaacacacagaaagtacgaagcaacatatctaacactgggaggggctggggtgtgtttatttgggtatatacaatgagtcatggattaaaattgcttccagcggatagatacctaggtgttccacagcattactgaacaagctgtcgtcatttccccattacctcagaagacccccttaattacttacttatattaactgtagaacgtatttatgcataccaggctctacctctgggctttctattctgttccagagacccagtaccagaatatttaaatcactgtggcgttaaatacgttttaatatctgatagggccagtttctgcgcattgcacatttttttttcccctttcaggaacgtgttcaggcccgcggcagggg

SEQ ID NO: 70853 - DNA, 4143 bp, Homo sapiens
tgctctgactccttcgagcaccctttgtgaaaacagtgtctcagaactactgacaccaaccaaagcggagtggaacgtacatcctgactctgacttctttggacaggagggagaaacccagtttggattccccaatgcagcaggaaaccatggttctcagaaagaaacagatcttatcactgtgactggcagctcatttttggtatgaaccaactctattcattcctcatcatgtggcttacttttattacagtcaattttgaggatattctggactaaatatttaagtgcagtcatttctttttggtttgcaaaaagagcacagccctggactacaagtttggagatttaaattctgatcttgagtttggaactgacaagttgtgtgaccctgagcaagtcagttaacctatctgagccttaatttccttatttataaattgaggtggtttgaatagattgcttttaaggtctttctgctctgtgattccttgataatacatttctttccttgaaaaatatgaggacgtttttcagtgatgtggcatgcgtttttttttaactgcccccccagccctgacatgttctttttttggcaaacatacataatgttacatcatactatgatgaacatccatgtacttttcactcaatttcagcaattatgaatccatgaacaatcttttttaacttagcctcactcactccccatgttctagtattattttgtaacaaatagcagacatctgatcattttatccataaatattctttatatatctctgaaagctatgggatgatatggaaaaaaatgataattccattatcgcaagtgatatttacagtaattctttaatatcagtaaatatccagtgagggttcaaacttccaattgcctcataaatgctacttgttttattatttttaattagtagaatcccgtaaatctcctaagtgtcttcttaatccgtatgtttccctttcatctttctttttttccttgcgattttgtttatgaaatgaggttgtttcacatgtagcatttgccacaatttaagttttgctaattgcatccctatggtaatgtttgctttcctctatcctctgtttctttaatttgctagttatgtctagagacttgatgagattgaaacatggcttttggcatgaatgtttcataggttatgttgtgttcatttagtaggtggcgcataatctgtggttttctctctttttgtggtattagcagctgctgcagataaatgcattaattcatgatgcttctgatatgatgagtcatctttgtagagttactaagcattagcaaaggaggaaatgctatgtaatagaaatattattcaatgccaaaatattttcttaaatagtcatagaactaacaagaaaaaatagatagcaaaaaaatgtgttggctgttctcactgtttatcttcctaacttcttttgatgatggaaggcagttttgtggaaattgccagccaggactttgacatgaaacagacccagggctaaattttggctctgtggtgttggataagtggccttgaataaattagttattaagcttcagttttctagcttttaactgattataacaatgcacacacatacctgacacactgttaaattttcttctcttcctgtttcttatgttaaggaaagatactctgtgttttggcatatgttggtgaatttgtaccatttttatcctctcagtccttccttttataagacaataattggagtagtttaatcttattcatgtgcagataaaagaggtttatgaagtttagggtgaagtaggcaagggaatctgtttactccctcttccctctactgaataattttccctctactgaataattttccctctaagaattgctgtgggtaataccaggagtggggacattgcccacatgcataagagcgtatctctccattcgatcagtttgtcaccatctttgctctgttttgaaagtcaggcttctctgtgactgtgaagcctgctgttccctgaaaatctgataatggagcagtggaggtttttttctttctgtgctctgtagatctcattgtttgcacttgtaatttcccagagttgaaaggaaagattgaactggaatattgtgtaaactatctgtcttacattagtgtagcattttgcaatttggggaacatcttcacaatttgtgtctcgttgttcagaacaaccctgtgaagtagttttggcaatgtctgtgttacatttcatgtaatttagccaactcccattccaactaggctttggctaaatctgacaattttatatatagcttaaaacaaagaatatacattcttttcacccctcccagtctacccatccagccttcatgattcattcctgtgtcaaggttagtcgctgttttccatttgaattggtttcttttatggtcagtttactttcttccctctcccctccctttcctgcacatccccatccttgctatgcctttctgtcctcttttataatggatatatctttttcctgccattatccctcagacattctcctcatggcacattttcttcaaatgctaacatttactgagtgtacattgaagttctgtgcatacaggaagaagttattttctgagcttagataatactatgtgtatatgtgattaaaatgaagattattttctaaagccttcaaattagaagtggatttctgtttcattacttccgttttaaaagtttttgccagagagttttgctaaatactctcttatttgctctagtgtactagtccagtagtgtttgcatgtggatgtctgtggatgacagttattgtagcactttggcagtgcactaaaattttgccactatgaaatgtttctttattgtgtgtgcgtgtgtgttttgaaatacgcacacagccacacccacatatatattaaaagtggttgtattcatttagtgaaaaacaaaaagtagatgtacttctgtaaatcagataaatgcttggaatttgattgtctacccaatcaacagttttccctctttgctctggaaatatttgtactcatatagcatatttcaaaaatgttgtcattcattaaggcctcttaaatagaccactattttttgtgtctggcagatgagtatgtcaaggattgagatgaacacataagtcttggaaattaaataaatttataaacataaagataatttaatgctgtgacttcattttttaaattctttaaaccaactttctcccaataaaaaattataaactatgtcttttcctacttactcctggaattttcaaaggaaaattttacgttctcaaagggaacagcttttatttgtccatgggctcacaaagtttcactgaacaaatttgttcaaatgatttctctttcaacatcattttctagcaaaatcatggagaacagctttacactttcaaggtaataggtataattctgttggtggtgacaagctgcacttaactagtctgaaaaaagttgccatcactccttttaaataatggtacttgttttaatttcatcctgtttcctttctgcttctcctcaggcattgacttattaaaacttctcgtcaattgcaaacacagtaacataatggcttaaaaagaattatgtttctaggggctccattgatcatgttggtcataagctaaaaatacactgacatttgtattttttaccaattagtataattaatacaacaaaatgcttgagtagtagtcgagaaacatggatagactatgaagtttgtctctgtgacctacattgttcatgttcatgtccaggaaacatataagaaagcaatttgtaagctggagattatactgtatatattccaaattaacaaatatttactgagcgtcattgtgaagattacaccataacatattgaagggtctgtgagaggagtactatataaccctgacctttaaagagatcgccattgatgggaggagatagaaaaataatatattaaactattgaagaacaaaaacggaaaaatgtttactttggcaccaaatgaaaatgattaagaggttaacaaaaaaaaagcagtaagaataatgagacatttattctgggcacagagaagagc

SEQ ID NO: 70854 - DNA, 2911 bp, Homo sapiens
agcatgtcagaggtcttcacagcagcctctcccatcataggccaaaatgcctaggaggaaaaaataattttatgggctaagcccacggtccctgagctgtgcacagcctagggacttgttgcccttcctcccagctgctccagctgtggctgaaaggggcaatgtggagcttgggccatggcttcagatgatgcaagccccaagccttgacaacttccaagtggtgtttagtctgtgtgtccacagaaatcaagaattgaactttggtaacctctgcctagatttcagaagatgtatggaaacgcccaggcagaagtttgcagcaggggcagggctctcatggtgaatctctgctagggcagtacagaagggaaatgtggggtcagagcccccacacagagctcttactggggcaccacctagtggatctgtcagaagaggccaccatcctccagaccccaggatggtagatccaccaacagtttgcactgtgtgcctggaaaagccacagacactccacaccagcccatgaaagcagccagaagggaggctataccctgcaaagccacagagatggagctgcccaagaccatgggaacccatctctgtgacctggatgtgagactggagtcaaaggagatcattttggagctttaagatttgactgccccgctagacttcaaacttgcatgggccctgtagcccctttgttttggcctatttctcccatttggaatggttttatttacttaatgtcattacccctgttgtatctatgaaataacttgtttgcttttgattttacagactcataggtggaaggtacttgccttgtctcagatgagactttggactgtggacttttgagctaatgctgaaatgagttacgactttccgggactgttgggaaggtacgatttgttttgaaatgtgaggacatgagatttggcaggggccgggggtggaatgatatggtttggctctgtgtctccacctcaatctcattttgaattgtactcccataattaccacatgttgtgggcaggaccccatgggaggtaattgaatcatggggcagtctcccccatactgttcttgtggtggtggataagtctcatgagagctcatggttttatcaggggtttctgcttttgcatcttcctcattttccctttgcctgctgccatccgtgtaagatgggacttgctcctccttgccttctgccatgattgtgaggcttacccagccacgtggaactataagtcaaattaaacctctttctcttttaagttgcccagtctcagatatgtctttatcaggagtgtgaaaatggactaatacagagtctatccctggaaacccagagaattcttccagatatcattcaagaccatcagaacattacctgtatgagtatgcaaaaaccagatcaatactgggcttcaggtgctccttaatgaagatacaacctagattaaaaaaaaaaaaaatccaggtctctttgaatacctggaaactctttgcaataaggacatgtacaaacaagctcagactgcaaagactatgatgaacacctaactcttcaatgtccagacaaagacaaacatccacaaacattaaaaccatccaggaaaatacgatttctcaaatgaactaaataaggcaacagaaactaatcgtggaggaatagatatatgtgatttttcagacagataattcaaaatagctgttttaagggaactcaaagaaatttaaaataacacagaaaacaaattcagaattctatcagataaatttaacaaaggtattgaaataaacagaatcaaaaataaattctagagttgaaaaatatgattgacatcctgaagaatgtgtcagagtctctcaatagcagaactgatcaagcagaaaaaagaattgaccttgaataagggtgatttgaaaatacactatcagataagacaaaaaaagaatataaaaccatgaagcacacctacaaaatctagaaaatattcccaaaaggacaaatctaagagatattgaccttgaagaggaggtagaaaaagagataggtttgaaaaagtttattcaaaaggaataacatcagagaacttctcctaaacatagagaaacctatcaatatctaagtacaagaagatcatagaatctcaagcagatttaacccaaagaagtctatctcaaagactttaatagtcacactcccaaaggtcaaggataaagaaataataccaaaaatagaaaaaaaaaaaaaagaaataaataacataaaatggatctctaatacatctggcagcaaagttttcactggaaatctcataggcatggagagagtggcatgacatatttaatgtgctgaaggaaaaaaacaaaacaaaagaaaacaaaacaatttttaccctgccaggtgtggtggctaatgtctgtaatcccaacatttgggaggctgaagtgggcagattgcttgatttcaggagttcaagaccaccctaagcaagatggctaaaccccatccctacagaaaatattaaaaagtagccaggggtggtggcaagtgcttgtagtttcacctactcaggtagctgagatggagaatcacctgagcctgggagtttgaggctgtagtgagccatgattgtaccattgcactccagcctgggaaattggagtgaggcctttcttcaaaacacacaaacaaacaaaacttttactctataatagtatatcttacaaaagaataccctttaaacatgaacgagaaataaaactttcccagacaaacaaaagttgaggaatttcatcaatacaaggcctgtccttaaaaaatgctaaagagagtacttcaatcagaaagaaacgcacattagtgagcaataagaaataatttgaaggt

SEQ ID NO: 70855 - DNA, 2619 bp, Homo sapiens
cttttgaagagatagtacaatgagatgtaaataaaagcaacagaaaggtttacatcagggaaatgttgttaaagatgtagagtttttattagttttctttttgctggtttattttgttgcttttgcaaaaagtgttaagttgatatcagcttaaaataatagattataaaaattttttaaaagattataagatagtatctctgagtctcatgataatctcaaatcaaaagcatacaacagataaacaaaaactaaaagtaagaaattaaattacaccaccagagtaaattaccatcactaaaaggaagataggaaggaaggaaagaataaagagaaaccacaaaacaacaagaaaaaagataacaaaatggcaggagtaagtccttacttatcaataaaaactttgaatgtaattagaataaaattttcaaccaaaagacatagagtggctgaataattaaaaaaataagacttaatgatttgttgctcataaaatatgcacttcatctgtaaatagacacataaactaaatataaagggatggaaaaagatactccatgccaatgaaaacaaacaaacaaaaaaagcaggagtagctatacttatatcagaaaaaaatagatttcaagacaaaactataagaagataaaaataaggttactatataataataaagagatctatttaaaatatataactatttaaaatatatatgcacccaacgctggagcacatagttatataaagcaaatattattagatctaaagagagagccagatcttaacacaataacagttggagatttcaacactccactttcagcattgagcacatcttccagacagaaagtcaacaatgattcagtctgcactatagaacaaatggacctaatagatatttacagaacattttatctaaagactgcaaagtacacattcttttcctcagtacatgtatcattctcaagcatagatcataggtgaggtcacaaaacatttaaaacacaagttaggtcacaaaacatttaagtcttaaaacatttaaaaaatttaaataacatcaagcatcttctctggccacagtggaataaaactagaaatcaaatatgagagaaattttggaaattgtatgaacacaaggaaattaaacaaggtgctcctgaatgaccagtgagtcaatgagaaaattaagaaggaaattgaaaaattttgtgaaatatataatagaaacacagcatacccaaatctatgtgacgcagaaaaagcattcctaagaggcaagtttatagctatatgttcctacataaaaacaacaacaacaacaaattcaaataaacaacataatgatgcatctttgaaaagtaaaacagtaagaacaaaccataccaaaaattagtaggagaaaagaaataataaagatcagaccagaataaataaaaattgaaatttaaaaactatacaaaaatcaatggattaaaaagttgattttttgaaaaaattaaaaattgacagaactttagctagactaagaaaaatagaaaaagatcaaataaaccaaattagagatgaaaaaggagacattacaactgttacttcaaagaatgattagtggctactatgagcaagtatatgccaataaattagaaaatctagaagaaatgtataaattcccagacacatacaacctatccagattgaatcatgagtaagtccaaaacctgaacagaccaataaagagtaataagactgaagtcctaataaaaagtctccgggggggggggggggggaggaaataaaagccagggactcaatggcttcactgctgaattctaccaaacattaaaaaaacaaaacaaaacaaaaaaaaactaatactaattttactcaaactaagtcaaaaaatagggcagtaagaaatacttccaagctcaatgggacaataatacagagctatggtaactaacacagcatggtattatcataaaaacagacacatagacaatggaatagaatagagaatgtagaagtaaattcatacattggcagtgaacacatttttgacaatgttgccatgaaaatacattgtgaaaagaacagtcagtttaattgatagtgttgagaaaactggatagccatatgcaaaagaatgaaactagacccctatctctcaccatacacaaaatcaaatcaaaatgaaataaggatttaaatccaagacctcaaactatgaagctactaaaagaaaacattggggaaactctccaggacattggactgggcaaagatttcctgagtaataccacacaagcacaggcaaccaaagcaaatatggacaaatggataacattaagttaaaaaactgttgcacagaaaggaaaacaacaaagtgaagagacaaccaatagaatgagagaaaacttttgaacactacccatatgacaagagattaatagcccgaatatataagaggttcaaacaactgtataggaaaaaaatataataatctggtaaaaaataaaaataaaaatgggccaaacatttgtacagacatttctccaaaaaaaagacatgcaaatggtgaacagatatgtgaaaaggtgctcaacatcattgatcatc

SEQ ID NO: 70856 - DNA, 1064 bp, Homo sapiens
tagataaactattctaaaaatgaactgaatagaaatatgctgaataatatacaagagtggatttatcagcaaaatttataaatacagagaatttgatttaataagaaattaatctcttttttccaattgaatttgcctttcattcatttccataagtcttccctgttatctaaaaaaagtagtaaggctagtctaggtttttccattttcaaagtaaccacatttctaaagttataaagacttattttaacaatgttcttaaatcctaatgcttcctaagtacataaatgaaagtgacatacccaaatggcaaaatgagctctcacataaaaaatagaaaagcaagttttacttaatcaacgctattttagaaagtgaggcaaaaataatattggcttattccctcttctactagcatgtcataacatttgatgcaattcctattattattaataatttaaaataaaacaagttccagaaagcacaagaacataaaatgactttaaagggaaagctgttgcatctctttggaaatatcaagggtcaagtttagcattaacgaactaatgccaacacaaatcgggaggaaaaatagttctcactctgcctagcagcacattctaaaattggacctcgcctggaatgaacttctattcactgagtcattgcctgtggaatttccattttagctctctaatttggctaatttccccacaaatagacatgagagaagcttccttcttccacatgcagtattatgttatttcacactgcagttatatccctctactgtgtacacaggaaagggaaataagtcttgacaaagacgaatcatttcttgactttattccaaggaaagactggcttagaattgaaatgttttcattttggctaccatttgcaatttttattgttaaatgtatttattttttaaactgacaaaaattgtgtatatttatcatatacaatatgtttgaaaatatatataacactgtggaatgactagatagagctaattaacacatgcattacctcatatacctactttttgtggtgagaacata

SEQ ID NO: 70857 - DNA, 815 bp, Homo sapiens
gattatatgctaaacaaggactgggttattgatgagttcttcaggaaagggtcgggatgagttttcaggaaagagcaattcccggaactgagggttcctcccatttttaaaccatcgaggttaagttcttaacattgtcatggcatttgtaaactgtcctggtgctggcaggagtgtgttttcttatgctagtgcattataattagcgtgtaatgagcaatgaagacaaccagaggtcacttttattgccataatggttttggtgtgttttggctggtttctttaccacaaatatgttttactgcaacctgttggccagctcctttactgcaacctttatcagcaaggtctttatgacctgtatcttgtgccaacttcctatctcatcctgtgactgagaatgacttaacctcctgggaatgcagccccataggtctaagccttattttacccagcccctaatcaagatggagtcactctgtttcaaacacctctgaaatatttctccctttctatttaaaagagaatcaataatcttaagctttgttgaggaacaaagatccatcttctgtaacttattcaggctgaataggggtgataatatttttgcctaactattggatcttttgcattaagggtagaaaggagctcactcaaaaaggatcagtatgctgagagtcattcataactctgagttctgacaaaaggtgatatgtggaagatcaataagtgttcaatttaagagaacattcagtaagtttatctgatatttttacacaaagagtaaaatagtaaagtcttctacaacagcaaag

SEQ ID NO: 70858 - DNA, 1669 bp, Homo sapiens
atctggaataatgcgtaagtcaccatctttgtagtcatcaagcagcgtgtacatatagagaacaggatctttctcgtaggtgatgtaaaaccaagtatccatcacaggagctcgcgccaggaccatacccttccattcatccttggtaccatgttcaccttcaaacacatgctccactgccttgccaatcagggaatctgccagtcgtgaatcgatacgaggagttggcactctctcaggaaggatctctagcgctaaaactctcttatcgcggtgcagttctagtccatacacactatctttgccatcatatttaatgatgtaaagagtgggcttcacggaaacctgctcgagcacagtacccttccactgctccactggctcgttgccttccttccagccgtgttgaatgcggcagcccacgatgttcctacgagtgaggaaagtgggcttgcgccgttgcttcctgtgggtgtgccttttcttcatcaggtatgcggacacgccatctacccccatcggaggcacggttggaggagacatagctcagggattaagagggcttggggaaagctgctgccctggtcgattaaactgacaaaaagtcaacactatgcaatatgatatatatattttttgcgatctcaaagacctggtctgtgctcccttctccaagtgcaaggctctcaccaaggttttggcagaaacgctcgaactctaaccgtgagcactgggacagcgtgtgcctctccacagtgctttcctctctcgccctagaagggttactgcagcagtggcggctgacgtagagatggcgggctcgcgagtgctgttcgtgccttgcgtccgccccaaccccgaccccaagtccccgaatcggccacttagctgttgtcgatgctggtgcggctgcggcacggcggcagaggagacgacggggacgaaaggcaaggagtaagagggatggctgcagcggcaaaggcgcaggcggcggcaagtctctggggagtccgcgcggcctgggcttcgcagcgctagctggcttggcttcactctggcgaccgggtctttgcggcgcagggaacccgccccctctgagcccgcctgagccttggccccgcccccagccatcccgccttccgctctgcgggcggcagccgggctggtcagcgcgcgtgcccgtgttcagtttgtattgacacacgcgccctctctttcatttcctcctccgcccctcgaccgtttccctcaaacgccagccagacaggccgactcccctcctcctcctttctggcggtctgctgcccgccagcctcctacacagtggctccatctgctttctgtcttccaggaattcctcacttaaaaaaaaaaaaaatgtaaaacacacgcacacccagaaagagtttgtgcatacaaattattttctttcagtttaagatatttaagatgagaataaaaaccctgtgtacaatttacagaccaccatcttaatccaaaatctgttttatattttctacctgatcatttctagtaattatttttattttttttttttttgtcagaatgtaaaggtcatgtactgacattgtggagatcttctaaaattcagtgaaataaaagacgaaactaccattaattttaccatccagactgcaccaaaatgtta

SEQ ID NO: 70859 - DNA, 1174 bp, Homo sapiens
gttattttgaaatacataataaattattgttaactatagtcgtcctattacgctaccaaacacgaaatcacaaataccaggaaagttaacggagaactggatcaggagccaaaatgtttacattcgaattaaggctctggattaatgaaaatgcgtaaccaggaaaagaaagaacaagaataatggggacatagagggtgagagaggagaaaaacgagaagaaaaagccatgtaaggaaaaagaatttgcgcctcagggtccccctccccctctgccctgttccagacacctattctcattcccgcactcctacccctggcgtcctgctagctggtctggcttccttccctctggaaaaaggcaaattattcaataaagggaggatgagtcctagctcatccccacttcttgtctcctgccgggtgttcaaatacaacttaccacgcagtcaccgccatccaactgcatgtcactctccacttcgccacggtctgaactcttggccacaagatctaagccttccggatgccccagccagttcaggctgctggtctcttgtccctaagcctttgccgaggtagtcggcttacttgatgccagcacaccaggccccccaccacccgctggaagcacaggccccagctcaggtcaggttccggaacctagcgtccccaggttctcacgtgacttagtttcccaggcaatagcgcttttctcccggatgtagcagtcagctgaaatggagagagtgcttcttaaagttaaccctcaaaccaccatggccagtgaatgcagaataagcccgctgagagtttcgtctatttctatggcattatgctggaaattataaagaaaagggatgaaaaaaactggagacttttcaccaacaacaacatacagatctgtattattaggattcttaaaatgagtatgtgttgtttttataattaaactaacaaaaggaaaataaataatgatgaataattaaagcgggattatgtatacaacaaaaccgtatgattacaacagcaccttatgtagctttgaaaataggtaatgcttcatgagagaagttatagcagtgtgcaaatatcaattcagaccttaaacaagaagaatatacacaccaaaagagatttctttaaacaaaatctatgctgtatgtgccctatg

SEQ ID NO: 70860 - DNA, 861 bp, Homo sapiens
atctaatcaaccagagaggagtaaaaagcaagacatcctttgagaaggtgaggggttattgccagtcttattgaacaatagactctcagagctatagaatcagtttataaaggaaatggaaggtggactagtccatgccaccccttgctccccaatcaatacataaactcccttgacaacataccctgccagcaattgcacagcctatctgcttgaacacaacgaatgatgagattactgtctcccaaggcagccctttcctttttcagataattctaatcattctaatcatgagctctgtctctgtctgaataaagttgccagccaaaaatctcagcaaacactacaaaagggcaaaacacagataaaggagagattggagggaacgtgaactcttcaataacaaaggtcaccaaaaggccttttctctgccaccacagtgaagcaatggtgaagtgtggatacaaaggtgaatgtgagggactgagaggaacctggttagttgcaagcagagctcccacttcacatacacacacacacacacacacacacacacacacccagttttggagccccagtctcagctttcaggaggatcagaagtgcttagggattcctgaatgtgcatgccaggaagcacttagcattcctgcctggcacaaagacaatcagcacggtatgtacagtcagacacagaaactactcctctacccctcaagggaagatttaataactctcactaattatatgaagtatcataataagaaggctgctaacaaattgttctccctctccagcaccaacacaatgagaaataaggagcttcaaccagagcaatgaaaatttttgttatataacaga

SEQ ID NO: 70861 - DNA, 1309 bp, Homo sapiens
caataggcaactatacgcgcaggcattcttaaaagacaagacacgacaaaagatttagggagagataatataccaacgtcatacatatcacagcgaggccatgttgaagctcaaaacgttttcccccctgagtaagaaagcttgttctttctctctctttccctgtctctgtctgtgattttttttttttctcggtggctctcgggatgaaatcaaagcgagagttcgcgacagctcaggtggctggactccattcagcgcgttcccaggaaaaacatgagtatgacattgacaagcaggaggactacaatcacggcaaaaacgactacagtttgcacatccagggtcatggtgcaatgcagaacactgtagtgttccaggtggggggccggcagattgggagatgtcagtctctgttctgtcagactgtccatacagccaccatgctagaaaggagaggaggaagtagggtggttagagaagggctgggtttggcgcccgagtttagtcgggggaggggagggggatggggacggggtgcttggttccccccttctcaggattgggctgatcgtttgtccctagctgagaaatcttagcttgcgctgaagtcggcagagtccagcattctctctcgggcgccacgggaaaggcaaaatcctagctttcaaagggaaaggcggggggaacctgtgagtggttctccggcgcctgctcagtctgtccgggcgtgcgtccgtccgcctgcctggctaccggtcagtctcagtctcccctactccctttacttcgctcgttttcctaagcttgctcgctctcttcgctgggctcccggctgccagacactcgttcgatccctgccttgctggccctatccctcttctctccccatcccccgctcagcccataggctgcctttttattcaccgagcgactgcgggcgcttgcgtgaggcgcggccagagccactgacatacccgccgaccaataacagatgccgcagtagcacgttcgctgcccaggggcgggacttgcgctggcgtgctagccgcgaccgccaatcagagcctcaaggctcccaagcaagctcgctctccccagaccggcgagagtcaccagccaccagttctggtttgggggtggggagcttcttgggggcggatagagggggtatataaggagatggggaggaaaaggactgggaaagagggagggaagggacccaataggatgcaaggggaggagatcacgtgaagagggagaaaaagaagaaaagacgaggaggaaggagaagagagggaagataatg

SEQ ID NO: 70862 - DNA, 1160 bp, Homo sapiens
ctctatgggactagtccctttgaggcctgcaggctgtatataagatcactgtaaatggggtgaagaggaggaactgctgtgtacgagttctggaaagcattaggtacagagagcctgggagtgtcggggggggaggggaacacaagactttgagaagaataggatatttgagtgctttgagttaatgagtaccccaataaggatatttgcattttaaaagaagagcttggggaagtcaaagtctataccaaggcattgctaatagttgattttcaggttttaatgaggagcagtactgggggactacagggtggggaagaggataaatgtcaacacagtctgactatgcatgaggcctgcctagcatatcctgccatagaaaccagggcataaaaggcatcccaatgcaaagcatcataggtctactccagcccacttggtccagctctgtgggaatactctgtgagatgggcagagagtggcatttttccagaaggattttaagtggcagagtccctggtgatggttcagctgtgggagagaaggcctggaaagaaaaccaaccaggatcagttactcagtggaggtaggaaacaggccaacacttggcctaaaaagtagagcttccaatttgaaatattaactggtctagcccccaaatccaagcaatgttaacatgtgtcaacaataaacacaagcaaaggcccaactactaacagtgtaaaagacatcaggcagtggaacaaatgtaaagcaggcaactgatttaaggaaaaaagtgtaatatctaaatcatgcagctagtaaatggaatgtctgtatgactacagatctaccatgctgcctttctagacaaaatgaaaatagctcctgggcccctacattcttcaaattccagcactcctaagtcaccgtggacacagtacaaatttcttccacctacgtcattcattcctaaaagaattggatgtggggaggagttaaaagttttggtgacccagagaagggtctctacacagatgctaaccctactaagggcagagaccagctttcaaagtcagttcattcttttgaacagcaaaagtcacttggttatactgtaaatagagtttcagaaggtataagggactactaaatctatgaatctgaagtaaaggtct

SEQ ID NO: 70863 - DNA, 3015 bp, Homo sapiens
tgaggggagccacactgggggagggggctctgctggaatcccggtggggcaggcagtccaacagtgcagtgccctctgccttgcccatgcccacgccgctgcagcaggcaggcagagccgcagaggaagatgtttgtgtgtggaacaaggctcgccttgaccccgcggcccttgccgaaagcagcctggccaaacggagaccagctctgcggggccagtccagctgccgcctaggcgcttgggctgtgacgcatgtagcgggcacagcccctcaccaccgggggagccaagcaaagtccagcgttcgggcggtcaccagtgtcagaagtgtctccagcagacaatgacaggggcctggcgggctgggtatgttaagtaactgcgaagttggagggtttggccacctcgctagctctcctgtacacagagatggtatgatacgttccgtactacaatgagggctccttcggcctctggcaaggaaatgccccccaaacaccgtgcctattgctatttttaaacgggaggctggagaggaaaacgcggccagtatcctccaagggaaaaggaggtgaggcgaggcgaggcgggagacaaagcggccttgcagctctaactcaaggactagcttgcgccgctgctctaacccaaggaccagcaagagcccggctgccagccagcctgcccgaccgcgggggcgggcgccagatgcgcccggaggcccaggaggaggggcgcggctagttggggccacaaggccaaggttctgaagggaagtgtgcgactgagctcagcccacaggcccaactgagctcctctggggagggggcagtctgtggatgtcccaatccacgccaaagccggtctccgtcgggcccaagccagcacgccagcttgagtccgcagaaaggagggagaggctggagatgcacaggggaggggaggggcggcagccaggcagccggagagaggggtgagcggtacccgcgttacacagctgttccagcaaatgtgctacaacaaagctgcagagctcctggcctacaaatgcatggcttggggtgctggctggcggcgcccttcccgggactgtgcggcagcacgtgcgggcccatccccgcccccccgaaagccgggaggcttggcccaggctagcctgccttcctacccgccctccccaacccccctccccccagccgtggtcgcttgtgcccaggggactcaaggccgctctgcctctccacccgacagtccgcaaagcgggttccaaaggagaggggcgagcgaccgggactccgacccgcctagtccttagtgccctcctccagtccgtaggagcagagcacgcgggaatgcacccgaccgcgggcaggcggaggctcctggctgtacgcaacgcttacccagcccggtcaggttcctagcccggttattgtccgctgagccgccctgggccgggctgcagcctcggctgccacggctgagagcgccgccaccgcagctgctgccgccgtcgccgcggctccagtcacctccagcactgactccccttccccaggctttgggtagctcccccataccccctcccccagtactccaaggccaccgggtggggcatctgcgtcctgattggcaggcatatggcccaatcgctatggtgggaaggcgtgccccggcccgcccactgttttccttggtgcgtttctctttaaatgcaaataagtgcaggcgtggtgttggcagggggcggagagggtgcggaaccactggctggggctccccactcccgcccccacgccgggctggtagtggcgtggctacaccgtggcctcaaggagccagtcctgcccggatggggctcgccggatcggtttcggttttcacgcactcccatttctgtggccgctgtgcattcgcggtactgtgccctggccgccaccaggacgtttattcctgagctagaggccggcggggagtaacgaggcagagaggttgaggaatctgggaagactgcagaaacctaagggccggcctatccttagtcgtagagacaaggccctgcggatcgcgccgccaggccacccagaggagggactcacctgccaggaaagctagctgcagcgcctgcgccctaacttcgtccgcctctctggcacaccagtgcccttagagaccatagaggccaacttccacccgttaccgacgggccctctgctgcccagagtggggaaagtccctccccacagttacccagcctgccggcgacaagggccaatttggaatccagagccccgggctccctttccaggattgctttcacttttcttctctgagatgatacctgtttccatagtttgaccctcacccaaatttcgcaccttctatggaatgtggagggaatccccaaggtctccagagtcccccttcccccatcctttgtgagcctggctttcggcaggcctttttccttgaaaagtctaaatattgagaggaaaatcttgtctgggcccaaaccggaggtcaggctgaggacaaagtgaggaggcctgtaccagccttgtctgctactgtgtgtgggatgtggcagggagcccggcgaacttgggtctctagcctaaggacattaagtggcatcagtggctgccagggccaggtgagctgaggcagcaaagaatctagttccaccactagttcaagaatatccagaaggcccagccctaaaactctgtgtgtgtctaaaaagggaggtgggtggattaaagctgaggatagagagaaggattagagaacaatgcgtgctatttttgcattgcaggagtgttctctgctgcttctgggtcctgacagtcttgaaaagatccagctgctgaactggtaagaggtggactgctgcctctgcatgtgtagagcacaggaactgacatggctgctagggatctgactctagctctacctcagacttgctggacaccttggccaattcatttttttctctgggccagggcatcaccccac

SEQ ID NO: 70864 - DNA, 861 bp, Homo sapiens
ggttgaaagggggtgtggacccagaaagagaacccgggaccccccacaggaaagacgcgtcaaagaaggctgagaaggctgaggaggtgtgtctgggctcccaggtgagcaccaagaggaagctcgcggctgtcagcctcgcttaactcttctccttaccttgggtaccgtaatatgatccatgactgcagttcccgccaccggaagatctcagtgctactccagatgccgccgccaccggtctagccgcctcctgcctcaacccgggtttctacccccgccctcccggtcctggctcaaactctcgtcacctgatcctcggcgaaagctcctatcgcgacactttgaccgtagccgttcccgccatcttgcttcctggcaagtgcccttttcttcgggaaattgattattctggttcaggttcaacgtttggccgagtctttaagtcccagattcgagtactgccacccttctcacccttcttgatgctataagggctctgaacacagatatcactcctttactctaatattacaatgatagcatcctgcagcagtaacacaggctgccccatgctggcaattgggtttctgaagagcttcctagctgtgagaccttgggcaagtcaccagagaatattttttgaaatatggaaaggtatatcctcctctctatctctcctttatgtgtctgctgccatcaacctagttaaaatctggaatactacagtatcctcatcacttttgccatcgtagatatgggaagaggaccaagaaagggcccactggaccagctatcagatgaggggtaaataggtgcagaccctcagtggtgtgctccaagtcagatttgtggtggaaa

SEQ ID NO: 70865 - DNA, 1455 bp, Homo sapiens
gagagtatgctgttgcagtagtcaagaattgttaggccctattaagggaggtgacccttaaccacctgagttatgcagacgagtgacatagtcagagaagttatttagaaaattaccctggcagcccttgtgaaggatgaattggaggagccaagacaaatacgtaggcaaataaaataaaaacaaataaaagacaaataaaaggcagtgagacaagtagtgaggttgttgggactgtcactcttaaccgcagaggtgcctgtcgaggggctgggagacggtcgtatcccaagtcctcgggcctatcgaattgcagagcatcctggacctctcctcacccacgcttaccttcacgtcgctccttctaggccttaggaagtggggttttgagcactttctaggtcgtaggcctgctggtctgagctccgacagcggcgccagcggtggcagcagtcgccgacaggggtggggcgcatgcgcacagttgctaggcaacggcggccgggcgccgcggcgataaccgcgccggggctgtgtgtgtaggcagaggcgccagaggaggaggagcaggaggatgcagctgcgaccgcggccccaagagggagccgccgctgctctgtggccaggggggcccagggactggaatcaggcctgggggtcgcatcgctgaggggactggtaacggcggtccctccagaggctcaggcctagtaccccaggagggtccgggccgctgggcgagcgccttccccccatcgcctcccctcgtccctccacgtcgatggtggtgaagttggcggcgccacggagcgcaaggcaccaagctgtctcccttgcacccagctcctctctggccccggctgttggacacctgcgccgccgccttctctcgcccgccgagcccaccccctgcggcgggcgggggaggggctcccccctgcaggggctgcgtcgagcagggcgacgacggggaccataggagagtaggggtgagtagtggcaccgcactcgctcggttctagtgcgcctttccggcctccgtggccccaggaggcgagcgaatcgctgctttctcctgcagaagcttctgacgcctctcccacatctgctcgcggctctctattcccttcgaggtagttttccttctcatagccaccactttttggtctcaaccctggcgtccaggaatgcggggtgggtgcttaaggcctggctttgcttcttagatgccatagatgctgataattctacgtacagtcacgcagcctgattcctgattcgtggacagactctcccagtgccgtgctcgcccctttcccctcgctctggctctggctctcgctctctcaggaggctcagcctgaccgcgggcttctcaggagcccattccccgggctgctgtcgctccatgcctcaaggtttgaacacatagctggagtggccccttacttttca

SEQ ID NO: 70866 - DNA, 1384 bp, Homo sapiens
ttacacacacaagagcctaaaaagggagatgaggagaaaatgtcacctgccatatcacctcctcttccctcagccctaatatcaccaggccaaaataacaaagaggaaacggaggttttaccggagcctcctcctccaatagacaggaaaaaagacagaggatatgctacaactatcagtccctgtcttaagcaggctgaattaaaaggatagctcttagcctgcccagtaatgcaagaatggcaaagcgatcaggtacctaaagggttaagaaaaggcattagaagccaaagccaaggcagagcaagcagtaagtaaaaaagaaaggcttggcagcagggaatttcacagaaatggagccagcaagtgcccccaggaactccacccacagggcagcagctgcaacaaagagcctactggggaaaggcaaaaggcgcgagacaaagtccaccccagcagaggcgtgcactacagcgtccgccctggccggcaacagccacctggcggctgggggagggagccagcacaggcaaaaaatggcacaggaaaaaagctgcgcctttacaaacctaaagcagccgccgcccagggacccgcctgctcagctctctagctctgcaggcaacccaaggcaaaatctcctgtgctccttgtttacaagcgacatcccagattataaatatctgctaaaatttaagtaaaatgtaagaatttgaaagacctctttctaataatggccactgttgttatctgtctccaaattcaatttaagtaaaacaacctctaaagggagagacattacaaaaggccaatgagttaattaaggactaattaaaagcaaactttgctccccagtgagaaaagtttcctaattacagggttattcattttatgggtgatattctactaacagcccttggaatttacctatttatgtcattccccaaaagtctagtaaatgttttacctacaaaaatagtttactctcccatacctaatgtgttaacactgtttactgatgggtctggtaaacatggaaaagccgcagtctggtggagaccacacaattcaatcactcgatctaggtttactagcactcagagagctgaaactggggctctgattctggtcttgggaactttttccactcagcccataaatatggctagtgactctgcatattctgtttatttactacaaaaccttgagacagcactgatttagtccagtctggagccagccctgttcactctttttctccaacttcagcaattgctagatcaacgtacacatccgtttttattacacacattcgatcccgcagctctctgcctggacattggcttatggcaatgattaagccgaccttcaggttatgacatca

SEQ ID NO: 70867 - DNA, 1291 bp, Homo sapiens
actcattgagctagaggagccccttatcccttgtaagtcggctcccaactcaatcttaccaactggactgaggcgccccactcaaacactgtcttgcaggcaagacttcctccccattggaatcggaaatctaccctagggtactaatctactccttaagccctggctcaggcctcactagtccctccggcatcctctccaagttgggagaaagtcactttttggaggtaatgggtaaacctcacagatataacaagagaattgttgaggcacaaccccttactttccattccgctaacgggattagcgcaagagatggctgccgcgttcccccaggcatttgggagagggacaactttaggcgacttaggggaagactggagaacagggccttatagaaactcgacaaaggaagaggtgcagcgccaccagcacgcaggcaaaagggccgaacccgccaccttacctgctcctccacaccgtgatgcggttaagcgcgtaccgctgcaacttatggtcgtcacagaacagataaaccgtcacctggtcccactcggccctgctgagccaggcgaccacgatgccgtgggccgagagtggcaacgaccctttccctttaacgcactttccgtaccacgcactccacacgagatccatcccctgggaacctagacctggcccggccccggattcccacgacatactgagctcaacaacaggctctgtgccgcgccgctccgcacagccttcagctcagcgtgctaccctcactccgaaccgccaccgcaccagcagccaataggagagcgtgaccccatacgcaagcccgccttccagcgtcagcatggccaatcggaacgtcagaattgggcgccgacctaatgacatgcggggttaaaaactcaccggccggaagtgttcttttcacaaagcaaaccctccaggggcaagagttcagcctctaggttccgccaatttcctggttgctaaccggcttctgtaccagaccggaagcggtatgtcttcactgcaagaggaattttattttgctcccctcggcgggtggcagcttgattgtagtcatccagtgaactgaaaatgcgattttaagtatatttttattgccgtgaatcaggacctaacctagtaaaacactggacactgaagcagggctacagaggaaatatctcatatcgaaacagttacagttgggttgaaaaaatctgcttttgtggcaggtaaccaggggccctgccttttaaattagtaccagcctggccaggcgtggtgg

SEQ ID NO: 70868 - DNA, 2033 bp, Homo sapiens
actaaggtcactccttttttctgcccaggcatacattttatcttctctgaggagggaagggagtagatggggatgctgaaaagcactttaatttgagcagttcttgccatatctttgcccctcatgtgaaaacttctcagccatggaactaacttgttcccatacccactctcatagcacagtcaccctccacccccattcatccacacccctgacatttactcacttcgcccatggcagagaccgtactggccatgctctctgcacagccctggaaagcctcttgtttctagtcactaggagagaaggtccagtctcccagcacacacttcttatctggatgtctctcattgtgagggactgggaggtctgtaggcctacctcagcctgattctggccctatctagtgaagcactcagtgatctcttgcgcccccctctggcctcagttctttagcggttgctacagcaagtggtctagttgggcctgcacttccaagtcagacccatagagggcaaccacttgccagtttatgagaaatcactctgggtgtggcctctccctttgttcacttccttttcagtgcttgtaaaattctagaaccacaggctgtcagaatcagagggtgtgtttagataacttatatttgaatatcctcatgataaagatagagaaacaggcccagagaagagatgagaccagtctaaactcagacagtgattcactctgtggcagttagggctagaatccacgtttcctgaatgccagttcagaacttttgaaacacacggccaagcatctaacccaaatgcctcattttatagttgtgaaaactgaggccccggaaagaagttgactaaggttgtacagtcgttgtgatagagctaggactcaaacccaggtcttctgaatcccagtccagattcagaaacataatgttaggcatctagttcatcctgttggtttttttttttctttatagatgaaaagagttcagagagggaatctaatttacctgaagccacagagtaaattagtgaaaatcagaaccggagcccaaggctggctgtagaactgggactgaatggaaactggggactctgacttctagtctccaagaaacctcaataacttagggaccccagtgtcttggaattaaataacagaggtagggatgcagtccttgcttaagctgactatgaatgaatccccaggaggctggaatctggggcatagtgtgtacgtgtgtgtgtttgggagggagggagtctgctctggtcccctccaaaaaactcttaagaaaagactcacctcatttctcccctttcaaggcctctggctttgagagtgagaagatgactcactcattgcccacagttgccgctgagaacataattgctagctgggacatcaccacagcatccagccatcacatttgcagagtagtgtcttgttttgtcaaagctctttcctatttttctttttctttttttttttttatttcagcttcctcaagctccagggagccagatgaggcagataccattacctcttcttttataaagaagaaactcatttatggaggggtggggggaatgaggggggacctgaactggtgttggactgactgagactaaatccccagtcctctgatttccagctttctggagtgtctgcataaatacccagagtcccagaggagacagcagtgtccctcaaatgcctgatgacagctcctccctcatttattaatcactgagctggggccagatactgtactgggctttcattggagacaaaggtgacagaaaccctgcctttaagtgttcacaatctggatattgattaagtcaccactctgcccatttcaatcctcagctttctcttcttctactagaaaaataactccaacagtgctttattttattttatttatttcttatacatttatttgagacagagtctcattctgttccccaggctacagtgcagaacttggtcacagctcactgaagcctcaacctcctgggctc

SEQ ID NO: 70869 - DNA, 1907 bp, Homo sapiens
cacaaccctgattatggtttgattttgcccagagacagagatatggagtccacataggcttaaggtctcttacagaatttagaccattttttttcattttatttccattccagcctgtgaaatggcgagtgttctcatcatgctttcttctctttctcaagagccgtcagctctaccaagcacagtaagctctcaataagtatttattgccttgaaattgaattatagctgtctaagccaaaacccagagaaaaggagaaatttattcaagatctcacagaggaatttgaacttgaatcctggtttctggatttcctgtcaagaactcttgcaaaaatgtcatcctgccttgtgatagctcaggttcagacctctggcagtggagggcttatactgctctgaccaacgtgtgactgggtctagtctctttacccctctgggcctcagtgctctcatctgcactgtgtgaagattaggctacaaggtattcagagggcctttctagttctgctcctaggaatctgtgaccaacactgagaatataaacctgtgggcccttgggtggggtgaggaggggaggaagcagttggggcctgcctcataagctgtgtgtcacaccttcctccctctcccctgactccaaatctccattaaaagaagtagaataacttttccggtttgggaaatcattctctgacccaaaagccattgggcctctggaaagtgggacagcgtgtccagcccacagcctctaaatgccttatagggctagaaaggccacggtggctggctgggcgggtgggaaatggttggcttggagaagctccccatttctggaagatctaaccctggtggggaagggaggtgactgccacttagccctggcaggttgacaggctgggctgaaccagtgtgttctggaaaggccaggaatgatgtcatgggacactttgggctgcaacaacaggaaaccactgagtgtttacattggctctcagagctcaggcagcctgttttttcttcacttcctcagtctatctgtttcctctgattcaaatactatgaagagggactcattgcccaggccagggaaagtggaaaggaggcccaagaagaaagagcctccttcccagcccagaatgtcagatgcttgggagggaaggccagctttaccctagctgggcccctgccaagaatagatcttagggtagggaagcaagacagttagggcctactctgagcgttctacagctccatggatagcaacttcaaacttcttccaaagacccaagttctaaacttggaagccatcttgtattctcttcagatctaatcagttaccaaatcttgttaattaaatctaattgattccattttaaccaacagtggatttgtgtgcaaactgctgtgttgtgctgtctgtgtgtggcaggggagacaacacaggtagtgggtgacatacaaagataaaagagttcttgccctcagggaattaatgatagagtgacagagtaacagtaggatgtcctccatctgtttccatctcttcatctccaaggctgctgctccagttcaggaacacccatcatttcccagctgtatgcaacagtcttttaatgggcctccctgtttccagtctttcccctcccatgcttccttcataattatattgaagtgactccgatataattatggaggaatgctctccagctccactctccagctccactctccagctccactctccagctccacgctctctcatcaagcctcctagatggtgtggcagggtggctttgagttttgtctcggtgtcaggcagacctgggtttgagtgggtaccttaccattcactattggctgtgtgacagtgggcagtggctttgcttttccaaacagctatttgt

SEQ ID NO: 70870 - DNA, 3554 bp, Homo sapiens
gtgtgtgtgtgtgtgtgtgtgtgtgtgtgtgttatcctggattatactaataaatatattattttggaagaaaggaggtacattgggcagagtccgccagggtccaggtttgggcatggcataccacacaaagcgacacaagtcatagacaagtcacacaaacaagtgacaaactggagtctgtccagagggaagcaagtaggctgagagggagtggaactcaagtcagggaaacagttgaaggatctgggccagagagaatgtaaatctcagggaaactgattttgacttatataaatgcagctctttgaatccctagctctcctgtgattgagtaggctgtctagctagggactgggagtgagcttctcatcactgaaggtgtgtaaggagatggtcagggagttagatgacctctgagtccattcttttctagtttttgagaggctcagacttgacaaatgtggacgtgcatggcctgcctgaggctgatgggaaagtcaagggcaggggcctcagggaaaaaaaaccaatgggatctgctgtgagttagagcaaaggccagtcagcttagcttcccacccctatcccctcagagagatctcccctccctagccaccccatcccactcgcttctcccttatctcagagcatctgacctgtggaaactgcaggtcttctagcccttagattagaattcctccctcctcttcccttcttctgagtcagagagcttaaattggctctgttattagggtgaataggtaggtggttacctaggtggtgtgattcccaagggcactagacctattcccttgtttcaagatacctccccaatgtctgatttttcattagtgctttgtactttgaatcttgaatgctttccaaaattcctttgcaaaaatgccaatgattccgggaagaggatcaccttaagctgccaggaaaggggaggggtagggaagggcttctgtattctgcacaggactgcttctgagtgtctagaggaagatttgtaggctgggaggctgggcaaggcaagagtgggaggagacgtttggggaggggtttttctattcaagggcccaagtactctgtggttaaatcttagaaccagctaggctccatagttcctaggcccagcgcacattcgaatcacccagagagcttttaaaaatattgatgctagaaagttctagcaactgtactcaagctagaaagttctaatttaattggcctggggtggtgtccagatatagttgtttttataaaacttcccaagtgattctaatgtgcaggcagggctatgaatcactaaaccaagagaagcctagttagatgtaatctagtttgagggagaagaaaaaggggctggattagcttcttggtcccctgtcaggtgggacccactgggaaggtatggtattactccattgctccctggctacaacccattgtctcaagggtgattgagggctggaaagctaattacctatgtaaggtgacctaactttctggtttgcctgggactttcctggttttgaaacggaaagttctgcattcccagcaaactggaaatgttggtcaccctacacagggtgactgcaagtatttagaccttaagttatttgagcactgattgggacaaccacttttttctctccctcagttttctcttctgtaaaatggggccagcttttaaatccttgttctgcctctctcactggctgctgcaaaatggaataacattagcaaaagggctcagtgatatgtatagcacttcaggatggaatgttataaataataagcagtacctgccaggctgaaaaggtcacaggatgcttgccaattaaatctgtaacatcctttgtggtggtaggctggctttcatatattctttccttctctcccatgagttcctttaccttttcccctaaatcctaggatatcagagctggaagggaccatagacacttcttagtcctatcccaccatcaaacagatggaaagatggaggcctagagaggtaaaataactgattcaagatcatacagtttattagtggcagagctggggttcaaacttagcacatcattatgcccagctccgtcgtctcagaactgcgtatcactgaccaaccacctctctgacccccataatcccataaaaaggacattatgttttatttatcccacaaatactatttgagtacaaagaaaaaaggaagctcaagggacagtggcagctcagggcagggggaatcaaattcagactgaggaagcagctatggtcagggacttctcagatgaggtgagctgagactagaataaaagtaatagttctcctggtaagtgggggaagccattaggggaatgacattctaggcagtggaaacatgtccaatgacccagaggaggcagacaacatggcttttcagtccaatccagggcttgggattactggagagcagggtgatgggacaagagatgagactgatcatatatgccctgttaaggaatttggacttttccctgtaggtgtcagaacaccatgaagggatttaaatagccactcataactccagggcaaacagagggggattttaaaaacaatggaaaagttagagttacccccaatctcagaacagagctaacaatcactcttctagcacaaactgccaagtactggagctgatgccaagccctgagtcatccctgggctactgggctgggaggaggcccagccccaccctcccctgtctgggcttggtttaggctgagccatgtagactccaggcctaggctggcaggccttcaggctatccttccccaagtgtgcttcccaggctgctctgagcctggagctatcaggaccctcctcgcttctgatagctgatagctggcctctgacaatgcatccctcaaggtctctgctttgattattgctctcatctgtatcagtggagtttttcctacctctcttctgggcttcatgtaatgaaccctcctactcccaggtctcgatagcacagattttcctttctttctgctcccatggattttccctaaagcatgtttgtcgggagttgagtgtccaaagcattgcgggggcacagagaagaaagggagtttctgtaggcggggcgggggtggtggtgagggggacagcttttcttttctcagaaaatgacatttgacttgtattgtgaagagtgagtatgagttggtcaagtggaaaaagattataaaactgaggagcagaaggctcaaagacacagaactttgaatctatgtggaaatgcttaggtgtggctccaacatagaggaaacgcttggtgaggtgaaacagagcagggatgaaggaggaaacattgagataaaactgcccagctgcctccaccttgatggttcatgggtacctcaaattcaccatgtccaaaaacttcattctcttccttctgctccgcaagttggtactattatagggcttctaatcactaattcctatctgttctgtaatacctctttaatccctcaaatttatcctcttctccc

SEQ ID NO: 70871 - DNA, 720 bp, Homo sapiens
gtgggtggatcacttgaggccagaagttcaagaccagcctctactttcatcccctgtgcagtctatgaggtcagagccctgaggatgggaagcaacctccctaggccagcaggcaagcccatgacccttgggatgtgctgtgctaatccagccccctggaagatgggggcaactagaatgtggagcaccggaaggctggtgcacttgcagttcagtgatgcagccagtctgagggttaatcaggacagagacctttgcccacagagccaggatgatttcatctctatggcaagcatcatcaatcaatcaggaggcctggagctggacaagtttttgggagatgagaagataatgcaagccacaatccttgcctttaggagcttttgttggagatccagaacccatgtcacaggaagagtaagacctctccagtttccaggtcagcttctaaagcttctaaacaagagaagctctcatttctcctgggtctcagatctggccctgagccatggtaggtacttgatccaggtctgctctcagcagagagacccaccagcaagcccctgtaattttttctccctccctaagaacttctcagcttctattttcagatgtcccccaaagcaacaggagcatgggatcattaatcttttgtattaacttgcttgattcttattgctcttgagtctggagacccagtggaaagaatcctagcctggg

SEQ ID NO: 70872 - DNA, 3374 bp, Homo sapiens
caggagtgagccactatgcccggctctcacttattttttttgtatagatatgggagggggtcttgatatgctccccaggctggtctcgaattcctgggctcaagcaatcctcctgcatcagcctctcaaagtgttaagattacagtcatgagccaccgcactcagcctaaaactcagacttgaccagacgacttcaacagtctagaacactgccatcctgggattctgtgaccttgacaagaaggagaaagggagctggcagacaaaccccaagggtgtggactagggaggtcacatctaacctgagggaattatagccagccccatcaggacatcagaaagtgaatgtactgggagaggggctaaaggatcaggtcactgatttgaggaaggtgaagactgggatttagatgaaggaaagataaatgaggactgagcaaggatgggtaggaaatatgatggggagagtcctacggaagagaatggatgaagtgttttaagaggtgaggcagtttagccaaaagaagagaagtttcctgtggacctgagatcttcaggcctttgaggagctgttagggacaacaggggatctgtgtggcctcagggagcagaactgagatccatggatggaagccatagagaaaaggagttcagacacggcaagaactttctaagagccagagctgtctagagaaggaaaagataggtagtgagctccccatcagtggaaagttgcagtcaggggctgagtaagcatctgtcagggcccagggtctgggccctgagtgggggtggggctggaaggccaggacgtggaaggctaggggctgtgaccagggtgggagaggagccgggtgggtctgggtggggagtggtagctaccctaggtccgcccgggcccagccgggccccccacgtggccgctgtggcctggctgcgccgggcctggccaggcggggctgggcggggcaaggccagcggtcggcggggaggcgggcgcgagggcggggagcggcgcggaagccgggccacataaaggagcgggcggcgcgacaggggcggctctttcctgggtggggtttgtgaagtcgtggcccgttagcaggaagcctaacagtcgccccgacgctagtgagggacccaatctgagtccccggccagccgaatccaagccgtgtgtactgcgtgctcagcactgcccgacagtcctagctaaacttcgccaactccgctgcctttgccgccaccatgcccaaaacggtgagtgccggaggtgggcgctgtcgaccccaatggctctggctgagcctcatagccctttgctgatggctgagggcttggccagccaccggcccgcctgggacgccgcgccctccgccatagccaagggtagggaggggaccggagtgggatcctggtctggtgcgccctcaggggttgagggggtgtccaggctggaagtttggacggggcgaggcctgcctctttctcaggttccagttccctgtgtctgagatgcaacagtcaggacggcttcgttggggcctggggtttccccttttccctgatgggccatgggcacagaggagaggattctggtccagaagacaacactttccccaacccaggaattggcacctttctggggcaaggctgccaatgtccaagaggggacatgggaacagagaagcagggagaaaggagggagccgctcggggcggatccggcacccccactcatctttcccacagcctcaccgggtggctccagctgttttccactaggaggtgaggagagagatgtgaggaaatcgtcatcgaggctgcacccgagagcaccaacacttatttaggcaccagtctgaggagaggcctaccccatctcctgggagagaggaccggtttctccctcctctccacctccaaatccctgcccctcctattgcttaatgcctctctatctcctcctatcccctccggactattttgtgtggtgtgggttttctcgtggggccacacctttctagagtggtggttgatttggggatgcgtctccaccccactggctgttacgagaggaacagaagcctcctgggagtggggataggggggccggatgcccaggagggagaggggaggaggggtgtgcctgactaatgagctctgcttgcttttgtgcaagtcatgccaaatggctgctgaggcccttcccttgctcagaaaggcctggtgaccaccctggcttgagtcccttaggccaaacagcttgttgagctggcctaggcaatgcagtgctcccaaacatgtctccccaggactgcttgagccttgtagaggtgagatagtgactagtagccttgaaaagggctgaaggtcccctgggatgagaggaggagagttgggggcccagccttttgggtttgtgatgagctttggttgccacgttactgtataccagcctcactgccaagtcgttcttgcctttccagaaccttgtccttcagaaacaccaagttttcaaaaagtatgtgctttcactgtctatctcctttaaattgcttgtggttttaggacatgaggcttttacacactttgttccctagtccccgcccccaaagagagagagtaatggttttggagagaggggaaaatatcccattgtctgccaaaacaagattataaagatcctgtcaggagcggctctttgggtctctctctgtggttgactcctgactcctcttaaggtgcggctttgcctgaacagttgggtggatctctgggaatagacattgctccacggtctttcttctgtagtggcatatctcatcctcagttctgagatagcccactttgaaacacagcttcatgggcctggaagttgcttcaaacttgcattaaccgtctcatctgagtcaaagtggcaaagaagacaagacagcgtgtttattgttttcctgggaatggagagagaatggagtataagctgtttgtagtcaggcctggagtaatgagggtacctaaatactgaaggcatttttatgcagattgactgaaacctgaatcaaattggaaggagagggctgaattttgatagactggaagtattagagaattttctatactttgactcaaggaatggtcaacttttaggaaaagcaactatattatgtctgttaagatcatagaatcttaacctgaaagggaccttggagactatttagtacaactctcttaaaaaaaaaaactaaaactaaaacaaaaatctaatgaggctattgagacctacagggaaagacctacctaagggcacatggtgactgagccaagattggggtccaggctttctgatgctcatctcattgaccctttattctg

SEQ ID NO: 70873 - DNA, 1500 bp, Homo sapiens
gtgagctgaggactggctattgtggggtacagctttttttttttttttgatacggagttttgctgttgttcaggctggagtgcaatggcacgatctcagctcactgcaacctccacctcccgggttcaagcgattctcctgcctcaggctcccgagtagctgggattacaggcatgcgccaccatgcccagctaattttgtatggggtacagcattttaaaggcatttgcatctagggcaacccagagcttccctagccttaagctttcctttagctggttgttctggatgggcagggtttctcacaggagtgttttgaaccatggaacaactgagctggccttaaatcttctgcctcagcctttatcttcttgatgggggcactaaagtccagaaaagggaaaggatttgagtgaactggtgatagtgccaggactaaaacctaacttgcttggctccagtgtaggggagggatggtgaatgcctaccttctaaatggcactcactgtgaggtgctcagtgtcttctccctctgtgctggtggtgacatgaccgtggagttatggccatgggaagagcaagttcctctgagtgtgtagagctgatctcatgggtttctttatttggaaatggctcaggctctgaccttgtctcaggaactctttgtagcacttcccaggaaggtaagtgttttgctttggcttgtgacgggtggtggaaggcatatgtgtaggctgaagggaggtagagagaggacactagtcacattttcctgcttgagactaggccttgctgtcctaagaaactttagagagtaatttcttcatcgtattcatagccagaggggttaggcagcttgttcgaggtcacatatagttggtaacagtattgaaaggagaacttggatttcctaattcccaagttagtggtctcccactggacttggctgtcttagaaggatgactccacccagagagcacagacttccagagaactggctctgtggtgattacattaacaagatgggtacaatggagttcccctaaaatggttttgctatagcaagtttttctgggatctccgatgactgtcttctcttcctgtctacccctcaccccagttccctgctttctctttgccctgtttaattttgagctctgacctttttgaattctgaattctgactcagcgctccagcttgatctgtcccttgagttaggagaacagtatggcactttttcaatttagtgacagtatttgctgctgtagcaaattgtttgaatgcagactagaatctcctggcctcaaagttcaccactcacctctaggtgcttataggccaagcctggggcaggaagctaaaaaaagacctttcaagcctccgtggaaaggaagcatagagtagtgttgaaaaacagactctggaactagactgcctggactcaaatctagctctgcgaccaactagttatatagccttggacaagttatttaacttct

SEQ ID NO: 70874 - DNA, 1063 bp, Homo sapiens
ccagttgaaatgcttcttgaggagcttcggatgacagggctgggtcaaaacaaatgaaaggggacccttgtctctgacgccctctggagcagttggagtggttgaagaaatactgctaacccattaaggtgtgagtgaggttgggtgttgttctcctttctagaagctactgggaaaaggcacaggcataggaaaggttaaccccagtcaggttttatgggctgtattgagagtctggaagaggtcctagcagataactgtaccagttaccacttccaagtcaacagggaagaggctgacttgctgagaagtgagttagtcagtgaaggaagaggaggaggagcagaatggcccctaggctaaagattcaaagcaaaccttgttttccctcttatggaaaaaagctagttgagacagtgctgtcatccagagaggcaaaacagaccaggacctgccctgccctgccttggccccactcttagtagcaggaaatggtgggaactggagcctaaacaatggagtttagcttccgacctgatgaaggcagtgtgagtgacgctgtgatgactattctctggccaaggaagatactagaactctgggattgcgttggtagggcacatccttcttctggctcccctgccccacttatacttgccttcttctctacaccagcagccccactgaaagcccagcaggggtggccccctggggaggtggcaggtggaaatgaggtcattgagctcagacccaactgggctgactcacaacctctgccccagtgagacaaggggaccttcccaagcagtgcttcccagatgtgcccaggcttcctatgccagaatgtttgagtcttagccaaaatagttgccaagccagtgtctgaagacaacatgacaggagaggtgggtggagttgtggaaggagctccaggaatgtccagaagacccgcctccactacttgttggctgagtaaatgtgacctcagtgatgttaagtgagactgtgtgtgatgaggccgacacattgttggcattcagtaagtgttcatttccatccttct

SEQ ID NO: 70875 - DNA, 712 bp, Homo sapiens
aaaactctttcttaaaaacaaacaaaaaaagatataattagattatagaaatttttcagctccagttccatggtaatcttatgggactatcatcatatatgtggtccatcattgacatcattgatccaaacgtccttatgcggctcatgattatttccctaggaccacagtcagggaggaaaaagatgtactccagcgacctctgctgaattccaaaggctgcggccatagttcctggtgacgcagacagtctgataaaaaactaaaatggcggtgtcgcccgtacacgtcgtgcagcagagcatgacggaaaggactctgctggaacgactggcggcacagacttaaggccggactccactccccaccctctgtagttggggcttcatacccctgagctatgatggcaccttattgtgaaaacgccctgaaagtgcgaagaggtctctaagccacaggtgtggcgatgttgttgtcattaccagggacattccagtaggcggcgatagagggcagtatgagtgccgcaaccacgccctactttttctagagctgggttgttaaatgatagggtttgatagggtttgaggccgagtcagagtttaagaatggtggaatttaaactttaaagctaggagttttcatctgagattcctaccggaaatacacaagggtttgtagcagtggtgaaggtcaggaagtgaattccttg

SEQ ID NO: 70876 - DNA, 2320 bp, Homo sapiens
ttatcaatgatccatgcaaggctccactcatgtttttgtttgtttatttattcttctatttattttccccttcacctgtacccattcacttaactaatcttccactggtctctgtttaaatgtcacttcttcagagaagactttcctgactctcctatctaaaatctcacctcctcatcactcttactctgttttatttttctttacagaatatatcactacttaaactccaattacttatctctttcacaagaatgtaagcttattgggagtagggactttgtattatacagtactgcattcctagagcttaaaacagtgcctggcacaaagtaggtggtcaactaatatttgtaaatgaatgtatgagtaaatgaataaatgaataaataaaaagaagatcaatgataactggggaagttaagtattcatagatgactcataaatacctgaagtattatatatgttaataattaatctcttgtcttgtctgtacttttattgatatactccttcaaaaaatattcattgcctacttgtgataggcactgtgctaggcactacagagaccaaaacaaataggacaaggtcattatttccaacaagaagattgcagtccaataagcaaaatagacagataagtagataattataaatatgatgtgacaaaatcattaataaacatatggacaaagtgctatgggatctctgggaaaaaagtaataaatttcagaagagccatatgtcttattggagaagaagacatttcatttgttctttcaacaaaaattaatggggcacctgccgtttgcctaccctgtgctaggtgccagagacacagcagcaactgtgagttaggttcagtataaggaatagctgagcaccaaacaagaagaatttaccttctagaagagctgaaaagaagctacaacccagggcgtgcatgactgccaatgtgagaggctttattccaggtagttgaaaagtccagcaaaaaggaattttggcagccacgtggaaggagacatgttctgaagaatgaaaacaaacagacagttcaaataagctcaaattgactttgctaagtaacattgcttcagctccctgaaatggaaaggtgaggctaaaagtacactctgttccaatggttaggtcattttggagccagcttctgagatcccaaagcacagaaaagaggattaatggaatacatttggaattaaaacaaataaaaaaactaacaacagaggttgcaacagcacatttcaaagtgctgtggtaaagagtgtaagtctaattcctccagctacctttgaacgacctcattgctttcaaactttgtagttacctggaagcatttgctttgtagcacaaccactattataagtcacaattgcaaatgctccaaataacaggcattgatttgtgatagagctgcttcctgcatggttagctctaagtagcatgctctagagtgacgaatttcaaagatttacagtagaaaaacaaaggtggtgtataaagaactttatttcaactttgagaattaccacagctccatattaatcattacaaataaagtcaataatataaatccaagaataattattttatttgttctattaaactgtatttaacaaggttattgatatctctgaacaacatcagttaagacagctagtaataaatataaaagtttgatgtgatgcatctaaaacttagcacaagcatttaaaatatccataatagatattatcacaatgcaacatgttacaaatccttctgatattttgcatctgactatcactcacgtccagaagagtgcaggtgccaaatcaatgggcctgaaccttggttgtccacttgagtagacatgtacagactgaattcaaagaaatactggacaaaactcacacctttctgaatagtggtgcacttagaggacgattaaatataaagttcagacattccaggatccttacttcaatgtctgcatgacaaacaaattaaccatgcagtccaggttaattcataactggtttccaaaagaatccaaatttagtacatcacacacacatttgcataagaattctgtttttaactatgataatttgaaaacatccttaagatgtatttcaaaaatgaagctaaaattaaatgtctgtgaattttctgaagactttcattagataagtttatagttgcctattagcttaaaaagtaaacagggagggcagtaactttagaccagtgtttctcaaactgtagtttataatccattaaaaaggcataaaatgtatttagtgggtggaatgggacc

SEQ ID NO: 70877 - DNA, 753 bp, Homo sapiens
accttggctattgtcatcacccagaactactccactcttgaaatactaaatgtaaacatccagttactatcacacatcctttcaggtttcttttcagttactcccaggagagctctctgcatcattcatatttaagcagttagggtgaaaaaatcttgtttatatcacataatcttgtttataatgtctccaaaaggcaggagccaggccctcagtacccttccttccccccaccaccaaccttagtccactccagtggaagctcatattacaaataaacttcttccccagtctgaaaaagaacacctaggccaagccactatggccatggcctctcagctattgatcattgttaaaaattaaccaatgattaggtttaacagccccagtctcttgaaactagggctagagtgtgtgagtataacagtgatcttcctagagtattacgtgaagggcactgggggagaattgtccttggggtccttaaatccccaagcaaatgccatttttaaataagactttctccctttggttaccagaatggtattttaattattttgaagcctttaggccttaaatgaaaagtggaccaaaacaattttattataatgcaacaatttgattggctcaaataatttatttcaaatataagagtggcttttagcaatgtaattgagaagggctgataaattactattgtctgggaaaccaaggtcttgaatacctggatgctcttggtaagagttgtgacta

SEQ ID NO: 70878 - DNA, 1250 bp, Homo sapiens
tgtacacagcatatgttcattaagcacttattatgtaattggtactatgctcttctgtgatcttattaacagaaacattcatagtgtcattctcacttatgtacgaagtaaatatagaggcagtgagcaccctttatttatctatccttgcctttctctaataatgaatgtacccatgtgtaaggtaaaaagaaaaatataagtaactgtaaagttacagcttacaagccctacaacttccaagtccttacattcatagtcacctactgtagaatgattaggtataagactgggtaaatataagggtgagggttttatgtaattcttagtaagctagcttataactccacccaagcccatctcttactcaagaaagcacattggaaaacaagttagtaaagatgatcttattataggataactctaaatctacttaattttcctttcaggtaaatcatttgcaaactttggtactttaaattttatgggtaacagattactttcgacacatcagtgcgttgcaacactgatctggtcttctgaataaagtccaaggccttttggctggccttcaggagaggctgtgctctggccctcatcttttatgagtaccttccccatacctattgctctgaagaaatggatctcgtcactgctgtctattgcactccaagccttggtgctttctcttcatatcaaggactagtgttggagccagaatttaatcccaggcaggtagtctggctatagagttcgggtatttaaccagtacactctactgcctctcacataattcttgcattatagtgcttgctgtaaggtgcaggaggaaggcagaatgtctctttcacgtgaatttttgtcctctatggaaccgtgcatgtagtaggtctactcaacccacttaatgtgggtttaattaataccctagctttctggaatgttaaaaaatgtaagcagcatttaaaaataaatatattaaagtttagggaagctacattaaaaattgtacccaatgtatttttatattagaccctgtggcaaaccaaaaagactaccggagataggaaaacaaactttgccttgtgaattcgctgtttactgcttcacaaagattccagatggctcgtagcatagctactccttcaagtttaaaggttaaaggttaaaagttatagaactgtagtggcaatttacaaagccactgcatttaaattctattgcttcatatataacaagtgttatgtgtt

SEQ ID NO: 70879 - DNA, 799 bp, Homo sapiens
ggagtctcagaaagatgtaaagagaggagttgataatcatggaatttcttctgccaccttaaagtgccctactattctgacacctcagcagtttttggctacagttttgagtctacctcctttacctgaggccatctcctcaccagccctgccagtttccttcttctattttattgagccttgcagatggcaagagagaagggaaggttctggagttatcagcctgcttcatcattcttgctccccttccccctaggaagctggggcagggagggaggggactgcaggttggaacagcaagctacccacaggccaaagtgagggacagggtacctttgatcagctccccgttaatgaactgtttttcctcatgtcctacttttttctttttctttgtttctttcttttttcctttggtctttaacatttatttatttatttaccaacttggtctgtgccgagcagacgtggttagctatctaaaggtcactaggatgaaaccatttggccagagcccagtgtttcagctttgccagggacacgctgttctactgtacctcagcactatcagaaacatgcaattaaagctcattttacatttctttcctcctttattttctccttcttatcttatacccactcttttgagtctgttactctaattgtatctgttttctctgttttttctatttccattctttgcagtctctactcttttccctctgcttctttttccaggcttggctctttctgcttgagttgacttgaagcaactctccattaccagtggaaattttct

SEQ ID NO: 70880 - DNA, 621 bp, Homo sapiens
gaccctttttttagcttctgatcttctgacccattgaaaccccttttaataagcattaatccgcaatgttcaaccccaccaattctgcaaaggtttctaagccactgtctgtttgcagctataaagcaaacaatttcacaatcaaatcactcactctttcctgacctctctcctcctcttcctagaattaatatcatagttagtattcaatgcaactacccaagcaaatttcccatgaggctttgaaacaccaactgatgcacattttacaagaaattactcagattgtaatcaaaatgacaaaaaaggaaatattccatcttttgctgattccattgttctttctcctgccttgtaaaactccttctttctgcctgctttcaaaataacatgtgtcattctcaggcagaatggagagcaaggtcaaagaacaaggagacaggaaaagttgagggcaatgcatcaaatcagagctttttggcaacattacatggtgacaagatgatggcctattaaaaaaaaaaaacaaacaaaaacctgcaatgagcctgtcatcgaaccctgtttcacagcccacaacacaagaccgagatctgaatcacagcaatagactgaaacacg

SEQ ID NO: 70881 - DNA, 687 bp, Homo sapiens
tagcctcctgctgataggcaagcttttcaacactcatctttctaataggtctaaggcactagttcaggagatatggttctcttgctttgaatacagtccctccccagccatttctcttcatgttaaaataggcctatataacagaagcttttcctggttttaaaagacaaagatgcagaggctgggtgggatccaaacgcctgggtaataatccaggtcgtggtgaccttgagtaacaaaaattactatttttttaacatctactctggatcacatgctttacattcattattattattacatttaatccttacaattgctctatgaggaggcaaggtagggattctcattcaacagataaggaagctgagactcaggaaaagaatgtgacttgcccaaggtcactcatgtagcaagtggcagagctaaagtttgactccactctgcttggtctcaaagttcatgttttttttgtactggaatcacactgtatcctttcactcttttggcttctaagtgtgtgaacttaggcaagtgactttgcctctctgaatatcaattctcttatatctaaactgaagttagtagtttataattcacagggttattatgaggactggaaagaatatacataaagagtttcgcacactagctactcagaaaattttagctatatcattagttatt

SEQ ID NO: 70882 - DNA, 427 bp, Homo sapiens
acacagaaacaacatgtgggacaagtaaaatgtacaaaccctcaatgcaggagcacacacaattgctcaggtcttttggatgcacttttctcctctaatttaccctattaccactagccacaggagaatcaacatgctgcagacactggggaattaagccatgtgccttccccttcccataggtataccacttcaatcaaagtagatgggtaaacacaaagagtattgcatcaccccgacaaggacacaccaggtaactgcatcaatcatgggcatggaggcttgccccagctgagtcatagcctctggacagcttcccaccagagtttttatggtgctgacagcccagggtcacctggacaccaccatgcccaactctaaaatgtcatggaccacacacacccaatcccaatattcctcacacctg

SEQ ID NO: 70883 - DNA, 638 bp, Homo sapiens
ggataatggatcatgaaactaatcgtggggctttgtgcgacaccacgggacacttgcctacaaagccatccctactccctgcttaaacggagacaagaacacattggtgattctcaaatgcaaactgtccctttactgaaaacctaatgagtttaatgcttactatactgtagtcccttatgtgctgattacattgtggaatgctgcagggagaaaaacaaattcacctaatgatgctaaagaaccattaggagactttactagtttaggtcacaagtgcctagaaatacagaaatgatctttgacctttcctccatttttcaaaaggacgctatttctgtgaacctcattgacctctccagacaaagtcccagattgcctttgccaaagttaacaacccatcttggcttcttgccatttctcatgtattcactagatcagtgcatgactgctgctctcaacccacatcatggggccagagccttcactggttaatatttataaaaaaatactttgaagattaaatccttggtcagtagagaaaacactagacatggatagaacaagaaattgtggggtctgggcctcctcccagaactgccaccaccagacaatgttatctttgacagatttgtggt

SEQ ID NO: 70884 - DNA, 1828 bp, Homo sapiens
ctttagtcccagatttcagttgattcaggaaataatatagccagaattggtattctatgagaatgtaatctgttttggtctgttgaaaaatactgtttgtttttctccatggctttgatcataataattcaaaattttagtttacaaaagcttgaatcatctatctaaataaagtaacagattttcaactgacaaataccaaagcactgtttgtgactcattaggtataggaattcctactgataaccctgtactttccaaaatatgagagaataacaccccttctttttattaacttacatttttactcggccagaaattaaggaaacttctgacgttcacaagttgattcatgatattctaagtagttatctgccctggatcagagtgaaagtaagagggctgggggcatttcctcaggggcttctgagatatgtcatacttctctgttaggcaagtagaggaaggcattagcaaggaattgtgggattccacctataacacatcatcagtgctattcccttgtgacttcgctgtcacccattcccagaagcagctgccaggaaatgagtacaaataatttgtcctcaagtcaagatagagccagtccaaccctaaccaaagttttcagttagcagcaaataatttgtatctctggggaccagggatcacttgatgagtggggctaatttcttaaaaccctggtgtggaagaaataattctgacaaaggagaatgcgtgccccatatttctctgcgtctgaatagctaaatgaccttgggtgagtcacttaagctttcagaggctcagtttcctctcctgtgcaacagagataatagtgcatgctgtgcttcactccaaaagtctctatgaaaattgactgaggtaatacatgcaaatgttctttgtttaccacaatgtcctgtacaaaagtcaggtggtatcactgctgccagagagtgaaggtgcgaagacagggtgaaggcacccctcctcatcatttgtattatttcaccagagaagtaatacggatatgacagcaatcatttagtacctttgaattctacagcgaggttctgttactgtgaaagatagcagtagcctcaattgcatctttggcctcattctgatttccccagaatactccattcttaaaggcccaaaggtgacatatgttctttgactggtggtcattttcccttttggcagctactgagtcccacctcagtacctggtggagcctaaatgaatatgagccaagattcccagtattttgccatctacaaatatatgttttgcagcaaagaatgctgccaaggacttttctagagtggactgggatagggcttttttcctggggaagagtgaaatgtgggtagggaggaagagggaccttgctaaactaattttcaactgttgacctctgcttcacatgttttgaaatcttttaaatgtggagtttaaactttgaatcccaaatgttatccctggcacctgaacttggggtcaaatatccttaggcattttgaaaagcaaatagcagtacacaaatgataccggtaattaactgttgcctaatgcctgagaagtaatatgacagtcagttttgtgtcaaacaaaccaggcttcaacctttaactctgcctcaatattgttacctttaaaatggggataataacaaacaataatatttcacttggagagttattattacaattacacaatatacatgttgtcacataatagacaattaaaataatctttattatgcattttctttgcattcatcattttactaggtttttcacaacaaatcatcaagaaagaa

SEQ ID NO: 70885 - DNA, 1582 bp, Homo sapiens
aaaagcagccctatataggttctatccttggatagttccagttgtaaagtttaaaatatgcgaaggcaacttggaaaagcaagcggctgcatacaaagcaaacgtttacagagctctggacaaaattgagcgcctatgtgtacatggcaagtgtttttagtgtttgtgtgtttacctgcttgtctgggtgattttgcctttgagagtctggatgagaaatgcatggttaaaggcaattccagacaggaagaaaggcagagaagagggtagaaatgacctctgattcttggggctgagggttcctagagcaaatggcacaatgccacgaggcccgatctatccctatgacggaatctaaggtttcagcaagtatctgctggcttggtcatggcttgctcctcagtttgtaggagactctcccactctcccatctgcgcgctcttatcagtcctgaaaagaacccctggcagccaggagcaggtattcctatcgtccttttcctccctccctcgcctccaccctgttggttttttagattgggctttggaaccaaatttggtgagtgctggcctccaggaaatctggagccctggcgcctaaaccttggtttaggaaagcaggagctattcaggaagcaggggtcctccagggctagagctagcctctcctgccctcgcccacgctgcgccagcacttgtttctccaaagccactaggcaggcgttagcgcgcggtgaggggaggggagaaaaggaaaggggaggggagggaaaaggaggtgggaaggcaaggaggccggcccggtgggggcgggacccgactcgcaaactgttgcatttgctctccacctcccagcgccccctccgagatcccggggagccagcttgctgggagagcgggacggtccggagcaagcccagaggcagaggaggcgacagagggaaaaagggccgagctagccgctccagtgctgtacaggagccgaagggacgcaccacgccagccccagcccggctccagcgacagccaacgcctcttgcagcgcggcggcttcgaagccgccgcccggagctgccctttcctcttcggtgaagtttttaaaagctgctaaagactcggaggaagcaaggaaagtgcctggtaggactgacggctgcctttgtcctcctcctctccaccccgcctccccccaccctgccttccccccctcccccgtcttctctcccgcagctgcctcagtcggctactctcagccaacccccctcaccacccttctccccacccgcccccccgcccccgtcggcccagcgctgccagcccgagtttgcagagaggtaactccctttggctgcgagcgggcgagctagctgcacattgcaaagaaggctcttaggagccaggcgactggggagcggcttcagcactgcagccacgacccgcctggttaggctgcacgcggagagaaccctctgttttcccccactctctctccacctcctcctgccttccccaccccgagtgcggagccagagatcaaaagatgaaaaggcagtcaggtcttcagtagccaaaaaacaaaacaa

SEQ ID NO: 70886 - DNA, 1179 bp, Homo sapiens
cacaactctgaaaaataaaaaaaaaaaaaaccaaacaaaaaaatcaagttttgtgagcttggtcagagaaggaaaaggaaatctctccctaccccccacctccaccattttctctttgtctgcagcttcctcaagtgctgcctgtccccgattttcttttattccactcctttcatgtttttgacattgaaatacagactcttctttccacttctcagggtatttttcttattacacctgtggcatgctcctaaagaatttcttttttaaaaaaaatctgtagagtagtagattagattaaccccagtatctctcccttaagactagatgacatgaggggattgcaaaatgaatagctgggtttttttttttttttttttttttaccttgaggttaaagcctggttcaacagttgctgagagagttaactagattgcttgaggacttggcaatttcataaagtattttgtcttatgctgtctctgtctctgtcttgatctctgtctctctctgtctactgtaatgttggctactttctctcagagcctgagagacagctctgagacacttcccaggtctgttcggttcagacctcagtagctggatcacaagcagtacccaatatgcatatgagggtgcgtgctgcaagtgtccggctgggctaatctgcttaagcttcataaaaattaatcatttgaaaacaaagaaagatattaaagaaattattctatctccgacttcccctatcagcattccatcaagttctgggatgttaaattcagagaaagttaaccttatcttaaacacaaagttgacttttaaacaaaattgcttataaagttctgtacagttaccagcattggttgccctttgtcgtacggaagagaattatgaaatctcatatttacatagcattcttccaaaaaaagagacggtgttttccagtttattcactgcattcgtgtaagtgtgagtaggccaggaggggtgcttagtgattacccttttgctaggtaacaaagtagaaagttagattttctatgatatttgtttaccacgtaggggaacctctctagagcaatactcccaagctttttcttcttgaaatttcccacctgacagataatactttagattgttgctcttaaggacttctctcagtagctgctacatagagat

SEQ ID NO: 70887 - DNA, 1437 bp, Homo sapiens
actgaagacattcaagaagagtctggaccctttgggaaccatgtatagggcaaaggtttgaactcatagtagatgatttttacagtcactttttaacaatttaaaagcctatagatgactccaaaatgcccatttggatgatatgaggcatactttgtgtagttaaggattttaaatacataacagagaggctgaagggccttcgggaaagaagctggggtaagagtcaaagtgtagtatgttgaccgatgttcaggaataggctttggcatctgacagattttgttttaaatactggctctgggtcttactagcttccagttctgggctgcttcacctctcttgagtttcagtttcttcatttctaaaatgaagatactaatgcttcctttgttgggtttttgtgaatataagtgagataataaatgtaaatatctagcccagggcctggtgcatagtacaagcttcataaattgtacctattattattagtagtagtagtagtccagacaaacagagcttgggaaaacgctagactctggctgacatacatgggcttttccccaggccactgctgcctggcttccccttccacaaagctttgagtctccaaaatgctttggctggaatgtaagcgtgaggtcattgcagataacaggggagcatgatttgcttcggtaatgcaagttattaagttacttccctcagcccagctgaaatctcttattggttgatgtgtgcttcaaagtgtgagacagagctagtctgaggagagagggagagtgagaagattcctcttcttggccagaggtcatggtcttccacaaggaacagaatgactcaatgcaaattatgggacctctttgagtttggggcccctacatttaaactagtaactccgttgcacatattggcacccttcccccaacaaaattactgggcaggaattttcttgaatccttccgtggcctggaatgatctcccttctcatccttgtgatccacacagctggcaaatggcaggcagcagaacaaaaacaagcctcttagcatatagggagagaaagagtcacagcagtactgaatttgcttgggaacctaatgttaacaaaggaccttcctctcaacaccccaaacagattaaaacatttttttaacagcaagttgtgtctcggagcagctctttgcttgggtatatttaaagatctgctgagtcatttaagagcaggctggcatatcctaagaggcaaggactataccccagtctatgggggagtaagttgagaggtgaaatctgtttggctttctcccatggaaacaaacaaggtgatccacttccatctcccacgactctggagagcatctactaagccttcttattctatcaactttgaactcctcagtgtataatagagtaagggtgagagggaaggagcag

SEQ ID NO: 70888 - DNA, 1690 bp, Homo sapiens
agtgtgaaaagagggttatgcattcaggggtcagcagatggcaggcagagtagcccctccaaatctccctcccataccacaaagccctcttatttattcaaacttaacattagaagctcatttcaagtaggcacgtctgtgtctgggcgtctattttccttctttgtatatagcaggcatttgtcaacttggtgaaaagcattactcttctttccatttctgaggactaattgtgcttcttcgctagacacgagttcaaaacagtgggttgaaagagggcaagtttatgccaaagaatcagaaatagtcataatttagagagaattctagaggtcagttccctttcgtatggactgggcaactgaaacccagacagggaagggaattagaccaagttcacaagcacaaacactttactggcacattcagattggaaatcgagggcttctgctcccaggtcagaactaaatgccctttctagctagggtgttctttgatctcagtgattttgactctttctactgcactctggggacagtgggttctgcggtaccaactccaattaaagtgggaatatgtaccagcccctccccttggtttttatttttcagaggcctggcagtcagagggattctgatctctatatgcaatattttcacactactgtacttattgaaatcacatttgaatcttggcaattaacaaggcagtaattggcatcaggagggtatgttagtttgcttatctgcgccgtccctcctcttcccaacccactgtgtattgcagaatgttttatcagctctgatttgccaagttgctctcttctccagtaggtgctgcgagcagagagggattcctcggaggtcatctgttccatcttcttgcctatgcaaatgcctgcctgaagctgctggaggctggctttgtaccggactttgtacagggaaccagggaaacgaatgcagagtgctcctgacattgcctgtcactttttcccatgatactctggcttcacaggtgggaggttcttcaattgaaaacttagaactcagtttctagggtagtgagtgttgtaaggtttggactgtgacctaatattacgcagccatgacattatctattaggcatctagactagcttgcttgaatatcttagcatgttgactaatttggggcagaatatagtgtgggtgggggattttgtgtgtgggggggggttgggggttgagcaattcattattattaaaatgcaaaaagcacttaattcgctatgataagattgcctttttcatgcatactggcctacctgcaagacccctagagacagtaagcagcatacatggtgtcttccagttttcagcctttgtgcaaggaacaactgtgggtttctgcacatgtgttgtggtttgatgtttgtatgtgattgtgtaccagggtatgtgtgtctgttattgtgagttcatttctgagcagttgtgacacacagagatccagaaacagtgtcttaccctgtgtgctttgctagtgggaacgtgtcttttcttttgtgctcgtatctctgtgtaatcgagtgtcttgctaagtcaatgtgcctctgtctctttttaccagttctgtctttgtgtctctgtgccttcatgtattttttcccctgagtttgcacgtctctgtctatgtggatatctctcact

SEQ ID NO: 70889 - DNA, 961 bp, Homo sapiens
aactagttgggccatggctgcaggactctcacttgaaaagacatgtgtggtgatgttttctcaggcagttaagcaataaagtgtaccctgatttgcactgaaaataaagattcctttaaagggagcagttctagttatctctctctttaggtaccatatgctgaacgtttttctatgcactaaaacagcaactaggttttatactctgccttacagcctacttcacacccatttcacagggagaggaacagagaggtaagtgatttgccccaaattacataactaggaagttatttgctcagtgtggaaacttgttcagaaggtcatttcattgaaatgtaggaagagtttctggcacttctcttgagcaggagtcaaaaacctttttttgcactagcccagatagtaaacattttaggctttgtgggccatatgatctctgtcaaaactcctctacttcgttgttgtagtgcaaaagcagctatacacaatcctgaaatgaatgggtgtggccgtgttccagtacaaccttacagaaaaggcaataggctggatttggctctgagactgtagtttgctgacctcagctcttgaactgagctctttaactgacctcagctcttgaactatggtacaagatcccatggtcctgtttggtacctccatttgccctccttttcactctctgggagcatagctaagttcaaaattgaattaggtacttgtagtaagagcatacttataatcctgggatcttcatgttgccagatattaacctcttgaagtttttcaccacaacctgggcacttttctgatttgctcacttctagccccacctttgggccccttcataagcaaacatgcaggttttccagagagctgtatgctactgaatgcagaaaatttggctcatactggcctatggactatctgctcactgccctgataactattttccaag

SEQ ID NO: 70890 - DNA, 1015 bp, Homo sapiens
aacacatttttctttacatttctctttgttctgtgagccttttatgctggaatagttttcactgcaggctgttattgtctgcctccagaggagggagttgacctagcagtggtaactggagagtgttttttgaaacctctttccaaggttagttgccaatggcatctttggaacagtgtccttcacttttgtccctcagggaccagtgtgagaatgggaactttatgatctggagctggttaagtgaagtccaaaaataattaagaaagtgtttccttccctgggaatgagttcagtaggaatctcaatgtattgtagagcactaaggactcagcctcaggcatttgcaaaggattcttccagttgcctgtgttacagaggacacagttggcatttccttttggtgttgaggggagatgtgtacatggttgtgagatgactcaccctttttgcttagatagttccactttcattgtggacagactctttggagggccagtttggcatgcacgtgtgtgttcattccatcctggagcattctttatgagaaagccatttgttgagtggtttgccattttgttttacagccactctgtgggctatgaaatggtcatccggccgctttatttgtccctaaaaaaagcagtttttccctttcttatcttcatggctgccaagcagcagaaagagtaactcagggaagccatgtgatagccttttatctgtctgttcagaaactgatgatgtattggatttgataattcatcaaatctgaggtttactggtttgtatttgcctcaaaatgggcatataatattttgtcaggtaacataatagacagatcattggcattgctttattgaagtgaattaattcaataagcctgtaagtgcctgacatgtgccaggcactgtgctaggcattctgttaacagatgagacaaatctctgtcttttaggtgttttcagtcgaacaggggagacaaatatatgagcaaattgctattttttttaaa

SEQ ID NO: 70891 - DNA, 1002 bp, Homo sapiens
catatatgagaactgaaaagcattggcttggctgctaactgcattctcatctttctttctctgctttggcaaagtctgggattaaatctaataccttttaaactgtttgggacttcagccagagtgacctgtcttgaattcagaactgcgcagatcattccccattctaaggccctctcatgcctcctcattgcctgtaggatgagatccaagtaccttagcatagcttatgcactgtagtcacttgacctctagcacctatgcagtcttccagtcttatttacacattcctttgcacatgctgtttccccgtgtggggcaacttttttcttgcctgtctgcctgcctaagccaacttaaataaacatcatttctgtaacttctgtgaagccttttccaatctctccactccaagacgaaggtgtttctataggcatgacttctggaatggcagatcaaggatctggtggaccctctactcagtgaaacaaccgtttaactagtaaaaatgatcaatcaaccatttaaaatcttcagaaaatatcctaagggcacatagcaaaaagagaaacatttattcaagaaaagctattaagcctcagtaaaaacagcaagagtctatggcatttgagtcatgacctgttcctaatccttcccttatctccattcttcaggcaagtgcaaccaagaagatggaggcttcctctctctcaaaatcttactccatagttataatttcacccacaatggggcagaccacaagcatctcttttttttcccccagccctatattacagaatcactgttctaggaaggcatagcttagaggattggagattccttccacacccactttctacgtatgagggctttgccccagggatggtaagtcaagaatacagggatcctgcttgtgcctgcctcagctcatatataaggtaaagcttccacactaggaaaggcaaattaagaggactagggaatataccgttatccccaggg

SEQ ID NO: 70892 - DNA, 1754 bp, Homo sapiens
tggaaagttatgcatgtgtgctttactgtaccctctcaaaagcaacctaaacaggatgtggggtaggctctaaagcattcctcaagccacacatggatccatcagtaaaatgtggagggcttaaggataaaaaggcttaagtacaatctctggccctacattttctaaatgttatgccaccctgaccaaggggcaactcctacaaagccaggcaaaataataaaatcatatttgtctctagtggaatggataactatgcctaaaactgtgccctttgaaaagcaactagagagataatttctgaagtgtttgtccctacctgaatgtgtggcaaaattctaaactccctgaagtgtgaaagtggtttccaagccacatgcacatccagtagtggtaaagggtgaaaatctaactggctaagagggcttcatagcaacattaaccaaaaagtggtttatgtagtctttgcctgcttcataattccctaggcattctatgctattctgtactcagaaggcttaaagtcaggttagggaaaggaggcctatgaggttactgtgcagaggcagtgctgggaaataaatgaagttaaataaatttaggccatcgtggtttaaagaatggattgtggagataagaaggataaaggaaacccagagtcaagaaaaataaaacttttcattggtgccatgccaacccatatccgagcctgaggcaaaaggaaaaatgtgctccctgatatacacttatacaaaatatcaactaattttatttgttggactgaatagaaaaagtcaacaaaaattaaaaataaaaaaatcatgactatatttttaataagtggtttatgtaaacccagagttgaccaatgggatgccagtctcaaccataaaaacaaacaaaacattgtgagtaacaacaccagaagtctcaaagtgtcagggaaaccaatttcacagaagcagttcagccaagtcactaaacaaacaaacgactaagcaaaaaacaagaatgagtctcagaaagggtcaagtcagtatccagagttgttacaatatagtatctaaaatattgttttgaactaaaaattttgaggcatgcaaagaatgaggaaagtatgactcatacatggtattatatgaaaaaatcaacaaaaaactatccatgaggaaacaaagatgttgaaattcactagggaaagactttaaaaaccagctatttaaatatattcaaagaactgaaggaactatgtctaaaatactaaaataaagtataataacaatttcttgtcaagtagagaatgccaataaagagatagaagttataaaaaaagaaaaaaatggaaaatctggagttgaaaattataataactgaaatgaaaaattcactagaaaaggtcacaagaagatataacttggcagaagaaacaatcagcaaattagaacatagatcaatatagattattcattttgaagggtagaaagaaaaaaagaatgaagaaaactgaagattcccaaagaaatgtaggacatcttaaagacacatcattaggagaagaaaagaagggaaagaaaagagcagaaagaatattttttaaaaaatggataaaatcttccaaaatttaatgaaaaacatcaacctacacatcaaagaaaatttttttaaaacttcaagcaggaaaatgtaacgatattgatacttagatacatcatagtcaaaatattggagtcaaatataaagagaaaattttgaaa

SEQ ID NO: 70893 - DNA, 1244 bp, Homo sapiens
gtgagttatgaccactgctgtaagccataggtagttattgaaagctgctatggagaggagccacagaagcagatgttttagataggattcctctggggtcctgtgtaatttatggactggagaggatcagacaggaagcagaaagacttgaataagacagttgcagttattttggaggcaaagattctctctctctctctctgtgtgtgtgtgtgtgtgtgtaattgtaggaactatttaggcagtaaaattaacagatattagtcactgattgactgagtggatggcagtgataggtggggtgcgttgagggaagtgtattacattaagtccaggatgactcatggttttctaagttgagtcattggggattgccatccaatgtgagaaactatatagtcttatcatagttgatcttggaggtagacttgaattaaaatcttgaagccatcaattgctgtatgtgggtcttgggcagaacacttaaggtttctggacctcagttatttcttctgtaaaatgaggaaaataatgcatacctcatgcatttgttgtaaagactaaatgaggttaaagtatgtagagtgtagtttagtaactgggacgtatagtggtccagtaaacatcagctgttattattgtgctatatgttgtgatgtgtactggagtgagatggggtaggggattttttagtctctgccaatgactcctctccccatgatcaaaatcagaaaatcagtctcttatgtgttgaggagtgagacacttctcccaagtgtttaaggctaataccttgccttgttttgccttgggccagacctcactacacatctgtttaagagatcagggtaagctctgttcttggtgagtatctcaatggggctgtttttctagttcttgtagtttctttgggccaacatgaaatgtctaaccttggcttcttggttgtggattctcgtcaacatttcactgctacccaagttgtgtctgcttacatgatgctatcttccttcttttgggtttctgaagccctcagacacttggctgaacatttttcacatttcttaagctatatcatctgtgttttccctgccacagacaaagtcacaaaaggactttaagataggttttggttttttttttccccagggtttttatacattttgggtaagggcaagtggtaaatgctgcttttctgccttaaccagtagtgtctgacagaggaggtagcatgatgattgcag

SEQ ID NO: 70894 - DNA, 554 bp, Homo sapiens
ttgtgaattatgtcttttacacaacattagtatttgagattcaactatgtgtagctcgattccattccttttcattgctgattgtagtttattggatatgtgtgccataaattatttttctcctgtcagttaatgtttatcatttatgctttaataaacaaaactgctatgactgttcctgcatgtgcctcctagtacatatgtgaccaactttctctaggatataagcctgagagagggactgcagttggaatttacatttccaaagcccaaagtttagctcatgagtcagagctgcaatgtgccctttgtccacactaggtcaggatcagtgggagtgctacccaaaatattttgctagctggggagtcagggagaagcagagactgacctagtgaggccaggaggcactatctcaggtctctagtcaaaatgggttgcaattagtaaaagtccagattctgaatccccttcactatttatcttcctcttcctcctttacagttatttttgttcaaggtgcactttattaaactcatgcctaacaaacaaaa

SEQ ID NO: 70895 - DNA, 1033 bp, Homo sapiens
aattttacagataatccagatgcatccattggccaatggttcactttgtatgcataatatttgggaaacaggcagacccaatttcaatccttagttgtaagacttaatacatatgtgatctcgagcaaatcacttttgtatgcctctataaggataataatagctcacagaattattttaagaactaaatgatgtgtaataaagctactggtactcagtaagttttgtatccttttcctagagtgagtcttggtcataggcatgcgtatacttgcagcgtccctgggtaggccgaaagagcaaataagagatggtatctatggtattccccaggtaaaggaggccttgggttggcataagatttcacttctctttagagttacttaattagggaccagaaaggccatcagcatttgtatgagaatataacaaaggtcaatctcttcctctttactttttacctcccagtacactgtgagtaacattccccagccagcccagccagcacgtgttcattgcctctcttgacttccagactttggacttgaaggtgtcagagctctctgtgtatctttgtccccaacaagataagtctgacctccccagcaaattcaagtcctaagccactgtccaggagaaaagctagcaaggtcataaattattctccatattttccagccattggtttcccttgtccagccagaggtgtgtctcaaagtatgctgaggccagattcaatagaaacctgagccagcacctgtgtaaataatttttaaagctccttttcctgaagctggatgaatatttttaaaaactaagctggattgtcttttatctagcatgccgtctcctacattcctagtgctatggacctcttggaggaatgtggtttggttatagtggtattgtcttgtctgttgtgggggagggagacatttctttcagaagcaaggtaatactttggtctggtctatgactctattttgtttaaaatgaaactatggcagtatagtggtattcattctgcttccca

SEQ ID NO: 70896 - DNA, 1166 bp, Homo sapiens
atctcctaaagaggaggtatggactggaaagccccttgccaatggccctttcttgtcactgctctgacccaagactaacagggcagagatagtgaactcacatactattaaaactatccacttatacttccccctttctctttgctttatcactccatttaagtaaaccaatgagtctctgccttgacacagtggcaagctgacctgtatcttatatgaaagaattagatttgactctggggctcaggtgcagagggcaggaggggcataaggatggccttcatggaagaaaagaagtccttggatactgagtaacagctgagactagcaagcctcattgtccaggattccaagtcgtctagcaacatcctggtctctgctgcagacagaacagaggatcccccggcagaatgaatggagtctgatttcaattacgttcagtatagtcactctctttaggcagagaagccagaacacctggtgcagctagggccactgtggtcacagggacaagcacactacctgggtcctggaggcaagtgggaatgcagtttttcttccttaagcagatgccatataggcctggggaggaggatgtgagaataccagccaagttctcattggcactatacagagaaaggggaattatttcatcttgatggattctccccacagtctctgcacatattgatcttacttgtaatgagtttgcttaggttcacgagtcatcatcccagggagatctgagtcattggtgggaaagtcgaggcgacagattatatctcactgatctcactgtcaccaattgctctgtgtgtccctccaccttttgaaaaagtccatggattcatttgtgtgtaattcatttggatttatttcttctttatcaatagctttagtggggtattgcaaatgggaaagttgccccagagaacagtgtacattcacagcattattcagtagaactttctgagatgatgaaaatcttctatatcttatgttgtacaatataatacagccactaactacatgtagcttttgaacactggaaatgtggcaggtgagactgagggattatatttttaattttttaatgttgtaattaatttaattttttaaaatttttgctttctattttatagtttaataattaaactaaacttacg

SEQ ID NO: 70897 - DNA, 828 bp, Homo sapiens
tgcccaggctggtctcgaactcttggctcaagtgagctgcctgtctcagcctcccaaagtgctgagattacaggcatgagccactgcacctgtggaatttgtatgcttattcactacatcaaaaacacctcgtgtggtgtttcttatattaaagtttacctcaaactttaacatgggaagcatgggaagtattgagttgctgttgcctactcctaagggtatcctttccttgctattcttcctctttccttgtcaggttcgtccttctcaagaaagcgatgggggaggggtggaaagtaggagtgtgtagtacaacagacacactgctctttgcactgtgtgtcattttaatggcaacctaactgcgtaggttttgtttgcttttcagaagtgcactttttagatgaactcattcagaacaaacattgaccatacattcgtccacagtggccccatgttcacctttttttcagttacaaaaagggaaggcattgctgccaagaagcaaggtagtgaaggaccagaaaaaaaggcagaaggaacaacagaaaacagcaggggaaggaacacctcctgttggctagctacatacgctcaccactcagtttatccaagttccatttcattcctcggcttccctcagccccttggcctgactttgctgacagaatagttttatgtcaccttccaactgcctgaccccaaggctttccatctcaattcatgggccttgctttctccaatccatcactagcagtgtgggttgattttgtcttactcaaaaacgaaaacattctggccaggtgcagtggttcacacctgtaatcc

SEQ ID NO: 70898 - DNA, 1932 bp, Homo sapiens
tgtgcaagtactaaaattgtgcttggtctgaaggggaattatcgtaaacaaaacaaaacaacaaacaccaaaaaaaaaaaaaaaaaacacctccattcgtttggaattttgtccctccacattccacattcttcctccttaaatttactacttggattgcctatccaaaaatataaaacacttttatttcacagccatcccctgccttgttggttaaatgcttaacaccaccaaagggcacccaggtatcctggatgctgatgctgtcaacaatggctgccctgtctgactacattttagcctggggccaacgtaaactgggaccagaaataccttgaaagcccaaaaggatgagataaggaaaacaggttgggacatgaagattatcttttaagttattgtcacaatagttactctcttttagaccctgaacattttcagtacttgctccaaatggtttagcaacttttgaagtgggattaacaagtttggccaatgaagcttcttccctgcccaccgccagaggtgctggagaaaagtaatcctggagggtcggcgtggaggcagtagagaggtttataaaagtcaaggaagtgggaagaggcttgcgagcagcaggagaggcgcagagtcagaggggcaggggcggcggcggagggagcaggaggttggggcttgagcccgtcattccggcgcacgaaaacttgaagtcgctcggtagccggggaagggaaggaagagaggcaggctctttcctagaggtgccgtgatcgagggtctggcactccaagccaactcctgagaacgggaaatgggcgggagtcggtggggtggagagggcagccgtggtcgcgagagcgaaggagcggtctgagaatccggcttgagtgttaaaggctaagcgtgtctagctggacccgtggccccgaagaagcgagacaaggcgacgcggagctgtccctgacaccccgaggaccgagggacagcgaagggccggggccgccggccattgccaggcgccattaggtgacgcggccgtcacgcgatgacgcgctgaccggcagtggcctccacgtcgcaggttccgcaaagacctgtgggagcgacccgggagaaggagggccaagatggcggaagcggaggagtctccaggagacccggggacagcatcgcccaggcccctggtgagcttgggatctgcgacaaaagggaccgagggtgaggcagagtgccccctaaagaagtcgggggacgggctcgtggcctgagagccggagctccttccgcccggcaggcccttcttgtacccgatgccagaaccagtcccaacactgcacctgttctttgcgctaaccgctttgccccctgccctcgtggttccttccaggtctttttgtgaaactccgatctttcctttcccatcctcccaggtctcgtcatcgtcccctacattgtgttaaatggcgaactttaggtgatttcttaagttatcttttcttctgctgtcccctcattttatcaaaacctgtcaccagcctttgttgaaggaataatgagagattgcttcccgtgggacattaacgttttgttgcttataactttagtattgacttgttcagtgaccccagtaggccaggtttaacccctgtcgcagctccttgccattctcttcaccatacttgttctcctttcttattttttacttttttaaaaatcgagacaaggtctcactctgtcacccaggctggagggcagtggcgcggtctctgctcactgcaacctctgcctcccaggctcacgtgatcctcccacctcagcctccctagtagctaggaccacaggtgcgtgtcaccacaccaggctaatttttagtatttttttgtagagacggggttttaccatgttgcccaggctggtctcgaattcctgggc

SEQ ID NO: 70899 - DNA, 2453 bp, Homo sapiens
ctgtgtgcctggccaagtcactgcttgagcctcagtctttgggcttgcacctcctccctggcagcggtgtgaccggagggaaaggcagcggcgagggccttggaggacctgcaggcagtgccccgcccacccagatttgggtgactttctggcgagtccggtgggccagactgcgcccccattggccgaggggaggtgggcggggcgtccctacagccctactcgccgacgctccctccccacttgagctgagtggactcgggttgacaacggctaagcagccgcggcagctgctcttctggctggcaccgtcacccctgcccgaccccaggccccgcgtgtgtcccggacggagcagtccctcctgggctcgcctcctgcccgctcgctctgtgtcagcgcccgaacccaaaggggtggacgcggcctccaggtaggagtctgggcgacggcagggggagatccagacaaacgggggcgcctggggctccctctccccgctttgcctctctggcgcgctccggctcggcccttctcctagcggttccgccgggcggcgtacgcaagagacagggaggaagcgagccgagccacccccgcccctgggattggggggtcagaatcgccgaaattgggggacccccgagcgcgccagccgcgcgtcttccagcgaagcctcgcgagtggggcggtggaaggcagctgtccgcctgttaccgccgggcccgtgggtctcgcagccgtcgctctggggctttggaggggcgttgcagctggccgggggcggcagagcttcaggctctgttgccgggtcgcgccagatctcctgccctctcctttctctgctttcgagggcatttccaggaagcccccgtccggctgtatgggttttcccgtcggccactgcctcattgctttctctcctgagaaatgcccaggacttcttggtattaagatagctgcggggaccaagcgaaaacgtttggacacgtctcatcttcataggcctcattttcccataaagtccaaaatgggtttggattagaggaaaggcttttagtggaagtttttggaatttccaaattaggtagtgtggggttctctccacgttcctcctgacacttgtgaaagttgcgcgctgaattacgactcaggaaactggggttcagccagtccatgtgaccttaggcgagtcatactactgtgtgggccatagtgttttcagccacacctcaggtggcagcttgatttcagtatctaaagggcccggtctctttcaccctgacatttgtttacttggtacctggggtcaggctcctaactggcaggtaaaaggttgtctctgagacgctcggggtggcagcagctatgcacacggagagctttgtggtgattatgcagctaagccagctggaaaactagagtgtgcgtggaggggtgggcgacagcagccagaccaaggtagggagaggtgggagttttcttccagagcctggggccccagaggttgggggcctcagagattgggctggcttggagcctatgcttacccccaagtcccagggcctggcttctctcccagtcagagcctaagcggggaggaggggttaatgaatcacacccagggctattttcaaaccctgactcctcctgtgcgacctgctccctccccactctagggtttgccgcccccccgccccccacacctgtattattgccctctgagttttcctctcattttcatcctcctggaatgaaagggggacaaatcttgtctgcggatgcgatgggaaggtgggcagcccaaaggcatggagaagaaggctgcaggtgatttctgggtggctttcgcagtgggaagagtgtgatgggaagggtggtgttttgctgtaagggcataggggtcggtagtgaaactctttcactctaaaggtacagctgccatctagctggacattctgggctggttttcattttagggacgtggccttttgttaatgtgttggactttggattttggatttctgctccctagacctctatatttagtgctaggaaacaccacactggacactgcctctcctgtttttggagaattatgctaaacctctctgtgcatctacagctcccctcccccacctagagaggagaagctgcctacagatgatatctggaggtgtttagagcaagaagggctgaactgaaggtgtgcaaagcaaaggggctgtgtgcgctgtgtgcttgcttgagacagggcttgcagtgagtcatgtggggaggatggcagagccttccttattcaaacacaatacctcctgagttccagcagagaagcaaagaaagtggcaccaagaagactcgaatgttgtccctctctgtcctcttaaagttttaaaattccattattgggactacagattggagagggagcagaagacccctgtgtctaggtt

SEQ ID NO: 70900 - DNA, 509 bp, Homo sapiens
attcaatcaggcccagacactgaatgttctcagctggctgggtcagttggagctggccaagccctgaattgccacagcttgggttctccttgtgcttgggcatttctgcagtttgctctctggcccctccccaagcctgtgtctgtccctagtggccagccactctctgacccattcagccacaagttaatgagtgaactgctccccctgggtcgtaccagcccaaggtgctcctgggatcctaggtccctgtgggaagcagccaagggcctagccagctccagtcacctttatgctctctcccacaacccctctagaggtaggtatgcaggcagagctcagggcagaaggacctttagagggcactaggtccaactttccttctgaagcttggggcttcccgacaggtacttgtgcagttcctgctcactcatgttcaatacctgggaatgtgatatgtttcaagcaagttgctttcgtctttggaatgtgtgaaagttttctcttat

SEQ ID NO: 70901 - DNA, 2805 bp, Homo sapiens
cactaaagccttacgtgggactggacgaggagcagacaggctgtccttgacacggaggtgggcacagagcaggacttcaggggtcctgtgtgtaaaaagaaaatggaaatactttcctggggtacttgggacagggtcagtgggctggggtgttgaccagacgcgtggagaggagagcaggccggcagctcttgagagtgccaacttcccacgggttgagctctctgggaacaggactgagagggacccaaccctaaccgcacgagccgcacactcagattggtgccatcgggcgcgcggcgtccttaagagctccctgaaaccccgcccccttcctgctctgggggcgtggtatggggcaaggaccccgccactgagcttgctattggctaagagagcagggttggccttgcgttcgcctgagcaagggagtagacagcacagcggcagcggagggagtctatgcgagctggacagcagtgggaggtttgtgaggctcgcactggccgcagaccctcgggctcgatcgcccgggagccaggactcggcgacgcgaggctgccgggctacccggccgaggcttcgggggcgcaaactaatgggactggctcgctcggcagcatctccccgctcttctaagtacactgagcagggcccgcgctgaagtagaagctgtccgggggcgcgtagcccggagtcccagtgtggcccggaggaacggagcccgtgccagggcggcccagtcgggagcccggggaccgagcttgtgctgtggggaaacccccacttcttccaagggacagcgatcccgggacggtcgaggcgtcggggcggtcaccgagacctctgcgggaagaccccgtcggggagagggcgcgcagccccgaagcgtctcgggaagtcgagcggaatcgggcgggatcacccgggggcgcagagcccccgtcgcgcctcgtgcggcagcggagagcccaggagaacgagccctcgggggccgaagcccatgcccgggttgggggcggctgcccagtgagtcctcctggccggccgggcggagaagagcgacaccgaagccggcgggaggggagcacttcaaggccggcggctgcggaggatgggcgcctgagcggctccgagcgcagcgcggcagaggaaggcgaggcgagctttggtgaggaggcgccaagggatcccgaagtgcagtctgcccccgggaagatggctcggcctgggcagcgttggctcggcaagtggcttgtggcgatggtcgtgtgggcgctgtgccggctcgccacaccgctggccaagaacctggagcccgtatcctggagctccctcaaccccaagtgagtaacttatctcctctggacgctggggtgggaggcactccttcagggtgaggccgcacgccccggagtgcatgtggggaggtcttcggaggaggagcggcgcctcattttgtctccggctttttcgagtgttttcctgcgggcgggcggatggagcagggtgcggcggggtggggtaggggcacttggctgggttgtgaccccccgggcttcccaccccctgcctctgcacgtcttggatgaagtcgaggtggtcgcacaggcggagctggggagtccgggcgcccgagagcgcaccggagaactgagtggaggcgagaacgcagctccctccggggcccctgggaacgtggtgattttcgccgagagccgctccaggagcgagcttgactcgggcgagggacgaggccagaacacgggttcctcgtttgcgtagctgtggagggaacacagagcgggacccggcgcttggggtgggtggcagcgccaacatccccactcgggcttctcccattttcatttctctttcttccctgttttcctccctggctttttgctttgctgtctctttttgccccccgcccctcctttctccctgccggagcggtagaaaggcgggcgctgctcccaggctcacaaaggcagcgggtggagaggggcggagtgggagagtggtcgttgggtagtgggggttcgaaccagtgcccgtcaggggtccaatggagccggtaacagagcttcaagggcccgccagggcggagagtggcggccgagctgttgagggaggtgggtggagaaggagcgattcctgcccaggcaggtccccttggcccccgagtctgtcccccagattgggaagctgtgcttagttttccccaaggggttggggcggggagtgggcagctatataaaggacatcctttcttttctttcttctccttcctctgcacaactaccccaccaccaccacacacacaacccctccaaacaacacgcacacctttcagggcggtggctcagtggtttctgggcttttagtgggaagtcgctggggctgttgtagtgacctctggaccttctcttttggcatccaggactcaggttggaaccaagggtcaaaattgcccttcctctcaattttctggaggtcccagcaatgtgcgaacaaccccacttagcaggaaactggggagctttgacctgctccatccgtgatcactgattcctgtatctcaaatttcttcctgtccactcttgctgccccacgccgcctcccccccagccccgccctgccccgggtaacttcccaggctcctgcctaccttggcctcttgggtcccagggacgtttgatctctcagccctggagtaggagaaggcagctttagttttcttctcctcgattaaggtagagtcctattactggttggtgggatggctaaaccagggttggggtg

SEQ ID NO: 70902 - DNA, 1197 bp, Homo sapiens
caatggggtagtcactgccacccttccacacacacacacacacacacacacacaaaaaaaaatcccttccttgtgggattcttgggcatctcctgcctccctcactctcacggtaattaatgtcttaattggctgttgcctggggaacaggagagctgctgcaggcagatgacctcatggggggtggagggaggtgaggtgcccaggtggctatttgccctgcagagctgggagtttcacccccaccccccaccctgttctctccttacctttggcatcctttggcctggtggggaaacagaggcccagggtggagacctaagcgggtataagaccaggtggcctgctccttttctgggccctagcacaggtgggtaacccccacccaacccagctcctgctgctgtcccagtcttgggctggggcctggaaagaggaagaggctgcctggggctgggccagcccgctgtgcactttgaccccagttccttgccagcacggctgctaacagactgccacttgagtgcgccttgcaggcactcccagagcagccatggaaggagctggccctcacaccatccacctccacactgcctcctggccagctgcccaccccagtgccaggtgggagagggagcagaacagccagccccttccaggtggcagtcggaagggtttttgtttttgtttctgttgccatttgtgtaaatactagtctttttggaaaaaaaataatgtaaagatgttttgtataaactctgaattattttcttgttgcttttttcttagaaaaaaatgagaactaaaaaaaaaaaattaaccacatggagaaatgggtgtaaaatggtgtcgtgatgttgggaaatggagagtgagagttgtgtgcgtgcgtgtgtggtgggggtgtgtgtgtgtgcgctttcctgtgctcaaaccactggtgactggggcaggtacgggcagatgatggctatcctagtggagcaagatgttttaatgccctatgaccctcctgccactcccctcaccccaggtttttctgctctcttgttctgctgtcatggagcctgagaccatttcccctgttcatcctgtcacctctgtggcataggccacgggcatctgcccagtctggcacaggcccagttagagagggttaatggaggaggggatgttcccatggggacctgggtgtgt

SEQ ID NO: 70903 - DNA, 724 bp, Homo sapiens
ccctctcccacctggatctgaaatcccaccctatcacatgtattagttgtgtgaccttgggcaagtcactgaatccttctgtgcctcaatagagtggggattaggacaatcttacaaatcactcatgagatagtgtgtataaatgaggttacccttgtgaagcacctagcagtgcctagacagaactcaggtgagggagagggacagtgggagcactgtcacatggagaaaatgcctgcaggagccctcaggcacagctgccaccagccaccagccccagcctcccacccctgccctgctatgaataatgaactggtatcgatcccctactcgggaaattccctgtgacctgtgataaaaatacacccagcctgccagcctggagctccagacaggttttcaacagtcagggctgagcttatctgcacatcccccaccccactcccagccctaagaggggagctcagtagaacagggcattagagactgagaccaggtggtgcccaccatctccaccatcccatctccaggtagatgagattaaaaagcgggataatctgtggtgggagccttcctagccaggccccaggagggaggacctgggtttgaatcctgcctctatcgcttcctgccaagtgtctcagtttcatcagctgtaaaatgaagatagccattccttcctcatagagatagtcctagattcaaatgatttaaggtatgtata

SEQ ID NO: 70904 - DNA, 1360 bp, Homo sapiens
aaggaaggttgcacagaaataacatttgatgtaggaactaagtgcacgaagggaagccggctgtgcggtgaccggagttgcaggttgccaatcttgctgaggggggctccaccggacgccggcctacgggtcgtaggcgtgtgtggggtgaagggggaagaggacgggagaggattggctgggaggaacccggagctccatctggtgggtggacggaaaccgcaggggggcgctacttgcacttcgcgctcaagcgaccggatcttcaaaccgtgggagtggtgcggcggctagagtccctggactcctcaacctagggagctactcgcgaggtaaggggcgcgccagactggctcctaaaacgcactcgctcgtccgcactcctcgcgctccgaattcagcctcgcctcacccgggcttcagagcccacagaacttctcagccccgtgtcggcgacgaggagctcatggtaaaacagcgcctagggttttgcttgtttgtttgcttttaacagatgcctacgacttgtaacgggctgcctggtaaaatgagtctatggaaacggttgccagggccggctaacagcggctcccggaagtcctttgatgctttgttaacagtgaagctactggaccaatgaggtgcttcttccggttttgtccgcgctcgcctaattcttctttatcaaggttgcctttgaccccggaaaagagatcttccgggttcctctctccccaagatggctgctgaggacgagttacagctgccgcggctccccgagctgttcgaaactggtagacagttactggacgaagtagaagtggcgactgaacccgccggttcccggatagtccaggagaaggtgttcaagggcttggacctccttgagaaggctgccgaaatgttatcgcagctcgacttgttcaggtatgggggaagatagtaataatggctgagaacgaaggtaataatggttaccaagggtggagccattgcgcctgagtggaggggacctttagtggtgagaacgtttcgttcctacttaccactgcgatcttgtgtacattgtttacattccccacctctcttcccagatggttgatatcttacgactctgcttcctagcgtctgctgattgcataggcattgggtgtgagccctcagccactttcattgagtgaaactggccgctgttccccgtgcctcctccctctggtccactcccagcccagcctcccactccgtcccccagaaagcaagggccacaatttgaatgcctagtcaggcttcactgcctcctttttgctcttccagccgaaatgaagatttggaagagattgcttccaccgacctgaagtac

SEQ ID NO: 70905 - DNA, 987 bp, Homo sapiens
cctgtatcttgtcttaatctgttactcaacgaatgtaatctccatttggtcacagcctaatcttttcggcccaggggctggggaaaggaggcaccttccatctacggttggatgggacacgaccttgaggggccatcagggggagatgggaggaggtgggttggaggtgggaggagaatcacctgcggcaatgaaggactcgcgggaggctcgcgggaggcccgcaggagagcagccacctcgggggcgtccggaggccgggcgcgcggtgcagggttgcactgtagctccaccttgtggccgccccaagaggagggccgcatccgtcgtcgccgtgacgtatttgctgaatgccacctgttttccgtgccgcttggggactcgtgtccttgactcaggactccgagggcaaggtccgatttccacaagttttcgctcctctgggctgcgcgcagggtccaatttccggcccagccttcccttggaggagcaagttccccaatgtgtttgcggctcgggagtccctgggctccgcagctaaggtggccagtgcggagctgacggaggatgaagagtctagtagaagaagggaggggctaagccaaaaatggggacaagaggggctctgtggtgaccccacagtcttccgccacacccacattcgacctagttcgtatctccacacggagggaagtagaactaaggagtcggccaggtagggaggtcgggttctcggttcctcctctctcgccagactgggacctggggcagcactggcatcctcgggacaagacccgccccccaccctcggttgccgggcagccgcgggaactacaattcccagtgagtccccggccatttccggtatctggctggacgcaggcgagtttgaatccgtgttcccgcccccttctcccgggcccacccctttcctttctggccgccccgccctctccgtgcgcatccctgcacactccggctccggag

SEQ ID NO: 70906 - DNA, 2009 bp, Homo sapiens
gaaaactagaaaatgattctcaaactgttttgcctataaccacttcaagtgggcaaaagatcctgcaaaccaagtactctatctgcacattccatccttgcattatgggctaagcactagagagtaaagtcctctatcatgcatgctggaagaagccactcctgggcaattctgaaatgtcatgtattaaagtaactacagaccagggtcagaatccaaaagggtaatctaggacagaaagggcaaaaagccattcatatacaaagtacctaaacgagagtcaataaatactgaaataaacattctggatacttcaaatctaaaggatccacatagaatgaaagcagtgactgacaaggcaccaatcccagggccaggccaggtttcaaggcgagacagcacgtagtatctgcgaaaacttaagcataaaacatttctctccttcagatgctgatccgacacaagttaggaaagcgctcggtctcaaggagactccctttcttatttctgctcccacaagcctactgtctgccttttctggaatctaccttccctttaattcaaggctttgctttactccattatcccagggagacctcattagaaagcagccggccttcctgccctccctcttcagacttctcacaacctagtttagttatggagctcagcgatatatcgccttggctttccatcccccagccctcttccatcctccctcccttccttcagtcgctacagccgtgattcctatctccttgaattcctcactctaatctttttccatccaccccaccctatccagccatgcttcacttcctcatgggtagctttcctgcatccccgtccgatgtctccctcaggagttttctgcatcctccggccacaactgaatcggcagacctcgttccaagcctattatacccctaacccccaaatgacccctaaggcgtcttccccgccgttagttgcccccgcggtagcctccctcccccctcccgctcgcgccgcccggtcctccctcagctgtctccctcaccccgtgactcacccgcatgcgaacctcataggtggtgaagcgcgcgcgtcccacgcccaccgtctgaggattaaagatgtcgatctccaggaagttacttggcggcccgtaagcgtcggtcaggtcctgcggcttcgagttaaggcgccgggtatcagctactgccgtgtccgacatctttccgaaggagagcctgggaccggggaaagggggtgggggacagaggcctgaggcaggagcgcgcacggcccctcccgcttgcaaaataactagccaacccacaggcggcggcggcgcgcacgcgcgcccacgcacgcacgcgcacgccgcacgggcctgggccccgggctctgaatagcggccgtgctgactgctgcgcgccctgtagagtggaggccatattcaggcttccgggtgatgtttgtggccacccgggaacctgcatccccaatacgcagtacccaataccctgcctagcagcacaggctggctccgccaatcgcggctcctcaacccaagaaattgtctcgtaccgtgtatcaatcaacagtgggcactgccccgtgagccaggctcctacagtgataggccgaagcccagtgacctgaataagtcctggttttccgcgaaaatagaagggtggtctatggagggtggggttccaacaatagtactgagaacctataacgtagccgtcccacctgtgccactgatggtttcagttcacgccacacacaatggcgcactcagcactacgtatggcgccaggaaagcagcaagcaactaggatggggtaaagaaagacatttctctcttacttttcaggaaaattgggcatatcttactccttgttgccacactccaggtgtactcaatcttacatttatcagcaaattgagggtacttatttcataccttctatttctactccgcagaactccatacttggcactgctctgaggttgcttgc

SEQ ID NO: 70907 - DNA, 1134 bp, Homo sapiens
atagacggagttcctaaccaatgcaaatattattgaagacttttctaggccaaaaccgagctaggctatgggaaccgaagtccagtcagaactcagcaccacagaggcctccttcttccctggtttgcatccccagctcattctgcgcctccggaacgtttcatagatttttgctgagtgaaatcgacttgctgccgccaccgccgaaaaactcccggggcacagagctccgcccccaccgggccaggccccacctcctctgcagtcggtattgtccgatggttcccggcgtacctcggcttccctcggtagtttccggcaatggtcgagagtttctaacgtgcccccttgttgtctctcggccgccgtcctctcaaccaccgccccccttttcggctccctctcccccttcccgttcccccagtcagcctggccctgctggtgcctccggcgctacgggctgggcaagatggcggccttcgggatcttgagctacgaacaccggcccctgaagcggccgcggctggggcctcccgatgtttaccctcaggaccccaaacagaaggaggtgcgttcgaaaatcggggctctggaggggccgggggcacgcggtcagcctaggaggaggcactgacggctgggaatggggggcggggcggttcggtgagagcaaaagtcccgaaagggggaagagtaaagtgggctggcgtgggagggcaggacggggggcggtggggggttccaaggtatgaatagggggtggtgtaggggccgcaccagaggcgccctcctccacacacacctcagaaagttgtctgagacagcttggtggggtacggctgctcggctgttcgcaagagaagagtgatgtttgagggcgcgctgggtggctgggaatcctagtgaccatgggagtgagggtggggtccaagtgaacgtaagggcccagctttaagtaacgatctgttctacacggaaccctcctcctgccctttcaccttgttccttcttttctcctgccctactctcccaccccttcccccttcccctaaggaaaaaacaactaaacgccgctttcctgcctcaggatgaactgacggccttgaatgtaaaacaaggtttcaataaccagcc

SEQ ID NO: 70908 - DNA, 1887 bp, Homo sapiens
gctgaggcagcagaatcacttgaacccgggaggcggaggttgcaaggagccgagatcgtgccattgcactccagcctgggcaacaagagtgaaaactccatctcaaaaaaaaaaaaaaaaatcatagaggaagttatctggtacaatgtatagggcacctaagcaaatccttttttgccagggtaacctttcccaactcatgagaggtcagaggttagacaaagctgcgtagacccgaacctgaaggttggtgcaaaagtaatggcggtttttgcaattacctttaacggcaaaaaccgccattacttttgcaccagcctaacagatctagtgagtttcacagtccctggtggaatcggtttcccatactgctctcagtgcagagaccctagtgggtgccttctgtcctggcacgtgctgctttccggttctgcggttaccctggcccttgggtttcccccaccctcctcccatccttttcaggctcccggaaagagaagacccccagtgaaactccaccccttcacatagttttgatgacttaggacatgtgttcggacaaatacaaaaaaatgtgcttacgattctaattagaaaaagacacttagaattgagactgcttctgaaaatctgatcctgtgctggcagttcctgttgttctcagctagtatttcgttttagtcccctaaagtggccatgtgaccttgatagcaaacgccatctttctgcggagcccgcctgagctgcggcaagctgctctgacggctcgctagcaatctgccttttccgatttcaaaatctttagaccgcccaccaaaaccctttttccggtcggagaggcccggcaggctctcaggtcatttgcggagcaaacgtgattgacacgatctgcgtctaatgaatgttcgtctgcttcccagctcggattactagttccgctccctttcccagtttgtttttgatgactcatccctcaaattcttcacacactcgcctgattcccgcccctcccgtcctctctctcctcgctcccactcgacgcccaccccccacctccgccgcctcgccctagggaagtggatttggtgaatcctatcgaggatcgtttttttacagtgtattttgaacatatagaagcaaaaagcacaatttccgtacaggaaagaggaggttcatttccttataaggagcttaacccctcactgttctttgagctttttctcgtccacaagatcggggtgggagcaggggcaggagaaacgacagcggggcttttgccactcaatttccagttcaattccagaacccccgcagctctgagtccctagcaaaggtcagctgccttgccccaacagccggccccactgagggaggagtccgggggagtacagtcagggttgaaagtttacaaacatttctctgggtctcgggcatctgcagtgggcacctgcggtgggcacgtatgacagttttgccgggggctgcaaatgcaaaattgcagccctaaagaggaaacagaccttcagtcgttaataggaggagggggaaaggaagggggagtaagaaaagtagggagctgagactgaactaacaagctcttctggacccagacccctgaaataggcgaatgaatggacttccacctgcacaagaaatcctagctttcctggatagggtcaaatgaagccaatagaacatccatagtgagaagttggcaagagactggctaaatttgccccctttgggctgcttcttgtagtctcatttgctctttgatgctcacacaaccatcaccacttctctgctgtgtctctttatcccacagctaaagcatgtgattgaaaacttgcagtttgacctaagtttaacactgccttgtatagggct

SEQ ID NO: 70909 - DNA, 1246 bp, Homo sapiens
gagatggggtcttactatgttgcccaggctggtctcaaactcctggcttcaagtgatcctcccgccttggccaaagtgctgggattacaggcatgagccaccatgcccggccctgtcatacagttttagaggctgggagctagaagggttgaccaggatggcagcctgtacaggatccctctctgcagcttgcccgcactgtggatctgcctaaggccagggcatgggggaagcctgagggatgctgaggagcacaggtccagctcagtctcccagagagactaaacatgggtgggtgacaatgatgcctctcttcctctgggacaaggcagtgactccaggctatgtgatctgtctctccaaacccatagggagctcagaggatcaatcttgtttaatgattgtatgtgggaggaggtggggctggttaatgtttgtctggttcctcttgggctgtgggccatttctggctctggccctgggttcgttgtccctcccctgggctgggctgacagtacctggtggcatagggcagacacgcctgcagacattctctgggaaagggcagcagcagccaggtgtggcagtgacagggaggtgaggagactgggggctgagggaggtgggccagggagggctgatgtggcacagtgggccggaaataggggccgggtcttgccttctactgacctccgccttcagccacttaggtcccttccatgcttccctctgaagctggggtgaggcccctcctgccaggtgccagacttgcttagcctctctctgcagcctctttccaggttcaacattgcttttcctctcactttttttcctctggccaaagattccccttattcccatagggccagattctcaggaagacttgagggaccccctaggtgcaaggtggccaagtttgtctctctgagacatttcctgccacacagggttagggtttagtgggaatgttgggcactgccaggtgctgttttccttccttgattacaaggcaagccaggcatgcacccaacacggggctgcgagtggatgaataaagcgtgctcagcgggctgcagagggctagccaacagggccaaggatttgggagcgtgtgtttccactttcttgaaggaggcagactgactcaagctgaacttggagtaattgatggttcggagattttttttttttttttgagacggactttcactcttgttgccctggctggggtgcaatggcgcaatct

SEQ ID NO: 70910 - DNA, 820 bp, Homo sapiens
gtgcgtgtgccagcacacgcaggaaagtgtataggtttttgaatagtaggcctggtctcagaatgcaaactccttaaaggaagagaggccgccataagcagcgccatatacaaagactttgaggtaagaaaataaacttggaacttgattctaccatttagcagcagtgcaattgccgttgaggcaagtttcttaacctctctgagcctcaacttccttgtctgaaaaatggggataatattacaggactgctgtaaggactaagtgagatcacctgattttgcactgtgcttgagtgctagggcaaatctaaatctggggacagggccagagcctgacaaggccagagaagtcctgtctaattaaacatgagagcaaaacacgcgtgcagcaacaccgaggatatcaatacggggactttaacccgaagtcacaaaaacagtttggatttcaaaatcaggtcactcccctggatgtttttagaatgaaatccttgaggcattgatattgacatagggatcagttctccttccaaaggtaacagcaaaaattgagatcacagcacccagacaagggtccttagaggccccacagggagctactggctatgtcccagaagactcaagaagaaaaaaggcggggagttacaagaacctagaaactcaggggtggccaggatgtctgtggcacacccctgaagggcagagaagagaacagctaaggtttgctttgcagtttgaggaagcagcccaagaaaggtaaggaaaggaaaagcagaccaaatcaagaggcagcagaaaatcctgggacagaaggagag

SEQ ID NO: 70911 - DNA, 1193 bp, Homo sapiens
aatcccccttggaaagaggctccaactctatatcaaggctttcctctccagggggcagtggtgggacaataaagctatcaggctgggtgttacagcccaagtgggggacacaggattcttgggtcccatgaaccaggtaggaacaggcccaaggaaccttgaggggagctggtggacacaatgtctcagggaggtaggaggcagagttagactgactccaagactgacttttcaaatcaggctctgtcacaagagtataagagagagacacagaggcaaatgaggcatgctctctgccacgcagtagaaattcaatgtgctgagtgacctgggttatgaagaggacactggaattaggagacctcgttctccactgatgagctctgtccccttggacacgtgatatttaccctctccaggtctgtttcctcatctccaatagagagttaataataacctctctacctctttcacagaacttttttgagaatcagacaagatgtgttcaaaagctggttatgaactaacggtaaagtaaggtaagatagtatcataagcactgagaccatggccttacgacatgctagaattctcaatgagccagaaaggagtgaggctggttcaggtaggctgaagctagttaaaacaatttggcaataatagtgttggctcccccagggagtggacaccagtccaaacagcaaagtccaagagaggttgcaaacctgagcatgattcatttaagggtcaatattcaaggggtctgatcagggggcagaaaaggcatagtaacaggaagctcttgcatgctgtatctcatggaactggtccttttaggaatgtctatgatcttttagaggtgtctatgcacagagatgccaggagctggggggcaaaggaacagaggcagatgaactaggagagtaatcaaggcctccagccagctgagttggggtttgaaagcaagctgtggtatccatagagaattggcatggcaaccacaaactggttcagatgttcaatcagatagcctgggtgcacacagtgggggctagaggggaatgcttgctccatttactgattccaaagtacttaaatgccagacctggcctatggtgcagaaggggctacacaatcgtaccaagctaagctcctgttgattcctggagtaggccagggagaatgtacagggt

SEQ ID NO: 70912 - DNA, 961 bp, Homo sapiens
cctttcaggtcgcccacttcctcagccccgtccccctttcccattgctcctccagtcctcccttctcctgttgcccacccccaacctcaggcatttacaggaagacattttggagctacgatctctccttagacccccccaccaccgcctcccggctactgcaagatcccgcttgcaggttcggttcggcttgagcaggcccgacccctacctgcggcagggttagtgcaaaggctacaagcctagaactgcagacagcgacggccccgcgctccttctctacctccctccctagcagccgggacaggggtcgcggcccctttaaatggcagcgccgctcgcagcgcccagcgctctgcaccaggcgggcgggcggtgccagcaaccaaccccattggctggctcgaggagggggctcgcgagacagcgccggcccccggcgcgagactcccagtccagtggccgcctggaaattgcggagtggaatgcagccactagagacggcgcctgagcccccgcccggggccccgttagttgagaaggaaaagatagcctctggagctttgaagccggccccccgggaaaggcggcgtcccctttccacccaagggccgagtgcgctcacccacaaaaaacacagatctacgcacctgctccccttacctggctcaagagtctggcccccgtcacaccctgctcgccctacctcctggagcccactctacccgtgatcccctcctctcattcaaatggttcccggtcccctccccctccccgtgtctctcttagcttcccactcgtgttcaccccctcggcgtccgcccccctcaatagtccctacctacgccatgcagcaggcgcctgccaagattaccctcccccatccccacctctccgggtcccgccccctgggcgactgttggggtagtgagtgacagcggaggacggggggaggcaggga

SEQ ID NO: 70913 - DNA, 1621 bp, Homo sapiens
cagtctgatctagaggcctacaatatatccatggcaatgatgacacctgttgaatctctcagtaaatcataggaacaatagtgatgtttggactgctaggttttctggttaccatggaaatgagggtgctggttacaattctgtgtaatcacgcagagcctaaggtatgatgcaccccctcctcccccaccccgtctgtaaccatgaccaaagagttgactatttcagttgcgtttcccgagtagccccagcaacaggagaagcatctagaaatatgattaagtatggggtgtcaggatgcaagccctaacaaggaagtgtgaaaaaagaaacatggcggggcatttttttcagtaggaaaaggccaaatctattccattgaatacaatgacattgttactcttgcttcttgcacaggcgcagtgcaggactgctccgagcacgcctacgcgcgcattttctccccttcctctccctctttccactttcctctccctttttctcctctcctttccccctcccaccacttggtctttcagtctttcagtcagttcgtttaggtctctccttccgacccccacccccagctcctctccctttccttttccccctccccctttcctttcccgtctcacgcgccaggccgcttgcacatgcgcattaggtacaaagcctcgctctttgtccccatctgtcgttcacacgaactcaagcctttggcattcggcagccaatagaatctaagaaatggcggaaaaatgattccgcctcgggagctaaaccttgattggcagtttagctaaccaatcgagaacgccattttgtaccccttggcaggcaccgagctccgtcgtctcgtttccggcggtcgcgcgctcttttctcgggacgggagaggccgtgtagcgtcgccgttactccgaggagataccagtcggtagagggtgagttttgggacgtcttggttcttgtttgggagggtagtgggatttcttggaacaatcagcgaaggaagaggctagggcgaagctaggtttggagggtggatggcgcttccgaggccccttgaggccttgtctctgccgccacactgccttctcagcccacccgcggggggccacctttctcaactcgcttcgcttcgggctttccccattttcgttcctgccctgtttctttgtgcaactcatctccgaatcttacccgtgtcagtaagttgccggcctctgagccgccctgggcccgacggtgtggggtctattatgagagatcgctgaagtcgtggttggttagaggaggaggcgctttgtcgggcgctcctcctctcggccccgcgaggccattaattcagaatgggcaagtggggcccctcaagcgatatttctttgtcaaaactcttagctggaaagttcctctgcatatccagagcccgccgctttcgtagtcagatttctgtatgccctttttctaaagtcctaaccgcctagctccttgacgcatttatatagcatcactttttaaaatgaaacttaaatttatggatttcgcatcgagtattttattttccagtttgagaaactcttaccataacctgacacgtttctttgtgtttttaacagag

SEQ ID NO: 70914 - DNA, 2630 bp, Homo sapiens
atggaatgttttcaagacaacttgcctggattcttccaaatatttagtgtcatgaaaaacaaacaagaaggcaggtgattctggactaaaggaagatgaccaaatacaatgcatgaaacgtgaatggatcctagtattggaaaaaagggagaatgaggaagagtgctatgatgtggtaaagaaattatttcagtctatattatcataatatgtgaaaaaagcaaggtgaaagccggggtgttggctcatggctgcaatcccagcactttgggaggctgaaacgggcagattgcttgagcccaggagtctgagaccagcctgtgcaacatgacgaaaccccgtaaaatgttccaactaggacaactggggaaatttaagtgcggactcttccttaaataatattgacttacttcctaaagttgtgataaaggtactttggttccatagttaagatgcttatttttaggagtgaagaacaagatgcccataaatggtttagaaaaacaaaaatcctagcaaaatgttaaccattgtgagtctaggtgaggggtcagctgttcattttactaaactttcacattttccgaaataaaacgttgggggaacaagtattttttttgaggcgggctggagtgcagtggcccgatcacaggtcactgcagactccaactcctggctcccacctcagaccccccaacagctgggactacaggcactggccaccacatctggctaatttttttgattttgtgtatggatggagtctcgctttcttgtccaggctggcctcatactcgtgggctcaagcgatcctcccacctcggcctctcaaagtgctggaattacaggcgtaagccaccgcgtccggtcaaaaaatcaatttctagggaaaaatgtcaactcaaaacaagtaacctgcatagctcgggaatgcctgtataatttacgtcaagtctctccttgggacggaccggtgaaattgcacgcagcacaaagaccggctcttacccttacttccgggtattgtggtacaggaacccgaggttgcctgcgcgtaagccacgtgactcgagcagctccttctgattggaggaagagccactgctctaattcggtgccgtgagaaagctcgcgcgcggagcagtgggagcgggcgggactgaatattttctttgaccaaccgctttccacatatccatcctcctgatcccgtagcgtcgaatcaaaagccgttagtaaagtagttacttctttctcttaggatagccggtctttccgggttttcccccccttccccctcccctctccccacttccccctccctttcccctctgttttgagcttccggtagaggctggtagggtaagggagctcagtaagtcacttctgggcgactgttgttttatttccggtctatgggacccggctgcgatttgctgctgcggacagcagctaccatcactgctgccgccatcatgtcagacacggacagcgacgaagattccgctggaggcggcccattttctttagcgggtttccttttcggcaacatcaatggagccgggcagctggagggggaaagcgtcttggatgatgtgagggggtgggcgtgggggtagggctcggggggtggggctaagcagaggaaggaggtgcggggaggaaaggagagggtgctcaggcagcgagaacagggcgcagctaacgccggggaggaggatcccgtcctcatgggtgcgggagcaacgtggcgtgggagtgatcgttctgggggagagtgggcagaagagagcgcgaggcgagcccggggccaggggcgcagggaatagtggctttggagctagcgctctgccgaccagacagtaggacacatgctggtttcgcctactgagatggcttcccacccgtaacctgcttggagattcttgacactgcctgcccctctgacatcgctgccctgagatggctctatagagccagaggactggacaggacctgcctcccgctcgtttggttccggcctcaggcttaggacaatggggtgttcctagcacccgagcgggcctcctggtcacagtgcgccttttaggtggctctcccagcgtcttcactgactttcgtgaaatagtgtcctgcgccctagtgaaactaccctgccttcacttaggcccgttttcttgaggagtgaagctgtcggccgctgtggcccctcctgtgccgcaggcgcatgcgaaacagggaccgaacgagccccgcctcgacgcctccaatcccactgatccccctgcctcggccctcgttccgagaacgaccgttccattcattcagtcttggcagtagttatttgattcgtcttctcttgtagtatactttaaagtgtgggcgatgcagttggctgtggtgctttaataaagatctgatcgatgcggagtttggtagatgtatattacagttctcgaacgtgttgcttgttttggcacactgcacagtcatttttcatgtggatttgtgactttgtcgtggaccagggaaataagtcctgtggtgtgggagtcgtaggtttagttgttatcttcgactcgtgctgtccctttttcaggaatgtaagaagcacttggcaggcttggggg

SEQ ID NO: 70915 - DNA, 3089 bp, Homo sapiens
aaggcctaaacatctgccagtggaatctgagaagtctcttctaaaagttgaaaagctgagtttactcattacagatagggaacttgtagtaggtgtgtgtgtgcgggggggaggttttaccagttaaatcaaattacaagaggttggtgctcaattttcaggagagtttgtgtagtgatttttgtctttttcactgcatgatgtgactcttgattatgggatggaagaaattagcattatgaattttctctgtgccatttccataattaattgtttgttgactgttttgaagaaatttaagcagaatttgaggacttagttttaaaaaatgtagtgaaggggctaggtagcaaaaactttttgaagaaattcattgacctgctttcttagatcaaggactttttgaaataaaaaggctctcagagatccaacttgtagcctccagtggcttgtaatactttcttgctgatgtggcaagctaccttaagtcgtttctagaacaagaggtgaagtataaataccaatgtgacaaaatgtctgaacagtagacttgaaactgcaggaagatcgtaagaaccgatttgttcaaggaagtagaggcaattcatgactcaatctagacgtgtggtttaggcagatggcaagtgaattcatttatcattgttgatctgctttgagctcagtggaatcgccgactgtgacaatgtgcagagctagctggtggaaatgaagtcacaactcgaggagagtcatggattttgacgaacgtgaatcacctttaacatttttatggctgccttcggagtgcaaacgcccagcatgtccctgagttattaaacatttgccctatcaccgtgggcaggagtattctgaataccaaaacgattttgaaatttcaggctatacggccaacattgaaggtgtctgcattcaactggccctgtgaaagcttcagtctttttcatcgaagtgctgaaatcgatggccgagtcacaatgaagacgggctcaaatcggaaccctctcgctcctcgttttgagcagctgtctttgagaggcaatcttctgaattgactggctcagaattgatccgtgagagtcgtaaccatccgtttttgtacgaatacagttgataaacttttttagacgcctttggcatttatgtttaaaacgacaccacctgctaagtaacaaacactcttcttaatcgcggtggcaaaaacgtatccgtcccgtgtgtgtttgtttttacccttccgctacactcttaagaaacttggccgcttccgccccagagagtgccctaaccacgagtcgggttgacagggctgctcgcatgcgcggtctccaccgtggtgtttgtcgcaatgggcgctgcgcggaggactacatggaatctcgactttgcagcttgaagtcattttgttggcggcgctggttaccggctacctccgcgcgggcacttgattgtaacagaaagtagttccggcccatgttgtttcggccgaggagccgtcgccgccatttcaagaccgtactaggtagatggtcaattagagttcccagggtttgaagcctgtaactgctgccgccgctcaagccctccagagcattgctacggctgctgcccttgtactactacctccaaatacgttcttgctggtagtggcggcagcaggaccaattacctcttttttgctctccctcgagaagctccagatggcgtcttccgtgggcaacgtggccgacagcacaggtaccggtgtcccgttctaccttggcagatgcccccttggggtctcgcgccgtcctctaccttgtatcactccttccctcccttccctcgaaccatccccattacatcagtgacattgctaagcttttcgtggtctactggcatctgatcacatcgggttttccgctgttgtccgcttcccgaacatttcctcctcctcccttgcttgctttttgctgcctttcttgctttgtttttatttcgtaaatgttctagcattccactctctccaggcgcttttatcacacgtgcgcgcttagaatgtcgtggaatggactgcattggaatccctgccctttcactcctttgcagcggttttctcccctaattccagctcatcgcctctcctttttcccctccatctcctccttcatctccccccccagtcttttccccttagccagatttggtccttctctgccaatctagggcgggggtgccgttccgatgtaatcatatcctcactttgcatcacccgaggacgatcaaaagctcgtcgatggtgccacaagtcacctcgagaagaggggacattgagcagcaccctgctaggcagtgcctttctggtgttctttcggttgagcggtcccggtttagattggaaatttccaggggtttcctttgccatcgcccaattccaccgctgccctcagcctggatttcccaccctgtccgcggggaaccacacccttcccttcgcgaggttgccagccctgttcacttcctatccttgggggagaaaccaccccgatgctgctgctttggcgttgaccaccctgcccgcccaattctcgctttgtgttactttctcgatgtattcctccgccgccgcctctgggtctgccatccccattcttcagcccagtatctctttattcacagggtgtaatattcttttaagtttccatccctgcttgaagagtttgtaaagcaactggagtgtagctgcacaagtacaaggcggttgcccttttagacacttcagtcgcgagcatttggtactgaaaatacgaaaacaaccaaattgtaggagtgtccttcagctgcctttccatattgaggcgatttgggcggaagggggtggggaattgggctgcgcttctgaggtttcccgcgaggttattttttggttgtttctcagttgagatgtgtggagggttttagctactgttcctggaagttgtgctgtaagtagtaggtgaatcgtcaatagtgtcttatccgtaattgtagggagtgggattaataattagtccgtgctcctctccccacgtctccaccgtgattttcaaagg

SEQ ID NO: 70916 - DNA, 888 bp, Homo sapiens
ccaatgctgcagcctcttcccagagggcaaagaaaagggtgacttgagaggaacctgaaggcaaatgaaccatccctatggggtgtggggagagtagatcatctggatgggtttgctgattcagttgcatgcctggcaggcttctctctacctcgtggctcgggcattgagctttggaagccagtacagaagtcccacgtggtccctgaggtgacatgggaatcattttaccgcatcaccagggctccgcctgccagcatgctgcctttgatttgagaagcaaatacagaattttgaagattgtagctgactcagaccattgttctggcattgcggtcatagacacatgtgggaaattcccaaattgactttcccacagagctgctttggagtgggggacaaaaagagttcgggggcggagaatgtattttagttatttatttgattagtgcttgttaaatctttggactgtttcaactagaggcactgaatgggatttccccaggggtcacttctgggcatctagaagagtcaagaggtcaaaaggcccagactcaattttccatactgaggaaggagaggctaataacataaaacagacagtcccagattctttctattggtctacaggctgctgtcacagaaaaacatttggacgttcccacccacatactttcccccaacccatgtcctctgggttctccctctctgttggcgatccagccatccagcccacctaggagtcatcttcattctaccatctccttgcctcataacaacccttctccttcacccgtgggccaccccttctacacacacacacacccatacccaagaccaccccgctcacactgttgatttgcagggtcttacacattcaccctttct

SEQ ID NO: 70917 - DNA, 693 bp, Homo sapiens
ccctgcttcttatctgcttgaccccggccctcgcctcaccgttcccccgcccagtttccctcttgttaaggtggtgtgataaaaacgacccctatcccgggttagaggtgaaaactcaacgcgacaagtggaggagagcgggcttttagcgccagaagcttccatgatgcccaggtccgcgggcagggcgagggcacgggccggggaagcaagcgttgccgcgccgctaccgtcgggggccggcccccgggctgcttttcgtgcgcggagcagctcggccagtcaccaggcgcgtgcggaggcggcgagcctgcgagggcggccggtgcgggcgcagccggcgcgatgagtcaccatccctcagcacctccggaacacgaggctgcttggaagcagccgggcccccgcccgccctcctcccccgccccgcggagtggcggcgccagcccgatgcccggcagagggcgctgcagtgcggctgcggggccaccggcccgcgctgctctggctgccaaaggccggcgctgcctttggctcagagggaaagatcggggcccagggatggggtgcgtgaggaatgaatgtttctgcagtgccagaggtggctctgtttttgatccagaaacgaaatggacttcaagattcagacactgggcagagtgatggggccgacacggcccctactggagagtg

SEQ ID NO: 70918 - DNA, 2243 bp, Homo sapiens
tagagtgggtacatctcatttgacaacactctctcttgaaagagatttgggcctgggtcccaaacattacctcagccactgggaaggattttgaaggtcaggaaacaacagggatccacaagttcagcctaacccctccctgacagaaggggtggcccaggccttctttggacattgtcggtagagctgggcccctggttgggtcctcagcatcatatgtggaccaagcgttgtttggatttgccaagaacatctaaggactttggtctttgtgatttaagtaagttgtcataacttgggcaggaggcatgctgggatctcagccacctggctgttggggaagggatagggttgggaatactggctcttgggtggtcctttgggtgtggaaagcttaggcatggcatagacaagcatgtatgtgtgtatgatataggaagtatcccccaggagaaaaggcccggcaaaagcaaggcagagtctaaccctgtccaagtagggttggggttcaggactggagtcataactggcagctcacacaaggacctaatgcatacagaggaagggcagtgagaccaatgccagcgcctgtgtactctgctctcaccctgctcaagcagaaatgggagtggtggagccaatgggtgagcttcatgacttcagctgagagggctgaattggcctgctcggggctgccaccaccctacttaaaaacaaatcctcatagcccagctaccactgcactgggtgtttgcgactgaactgggcttatctaaagggttatttgtgagcctggaaaagggatagggaataggccatgatgtcctgaggctatgacagtagcactttgctaacttatccttgtccacccttccaatcccactgtggctgctcctgcctcctcaggaagggatacctccaagctcaactgcccactcctgcaggtaggcctactgccctcgcacatgctctgcccacttcttggattgctgggctctggctgcaagccctcagagctcctgtcattcctttgcagaacaaagcagctactccaagcaagtggtgcagaagggtggctggtggaggggaggcggagaaaatgtcaggggcttatgtcaggaaagttgaatgcttgccagcagctgggccttcccatctagggtgacttcatgaaagaagcccttgaaagattgttccctctcccttgtaagggtgcatttttgggaatcactttgttttcctctccattttctctgcaagtctgattgtttgaggagagctaaacgttatgtgtactattaaagaaaaaaaaagtggagaaaaccaccccttaaatgtaaagctgagtaatttcaggaaaggaatccaagggaatgaggtttctgcccaagtatgggaaaatatccatccatctccccacttaatcagaaaaatgatctgccgaataatgagtcatgctgcctgtcagcaaacagcactgaccctagccacagagccaggaataacagaggtgagagatgacagtagctatgacgaagaaaagacatgaagggaactggattcctgctgccagcagctgtttggctcacctttgccccgtcctgtgcaataaaaaatgcactggactgggctgtgttattggtgacactgatcaataccactggggttcatctgtgcattctgataagtggggtctccgcagggggcactcagaatcaatcacagctttgtgcacagtctgggagttcttttttactgaggaaagcatatatacagtaaattgcataaagcacactgtaaatgtacatttcaatgaagttgtatatgtatatgtgtgtgtgtgtgtgtgtatacatctgtgtgtaaccaccacccagatcaaaatatagaacattcgcagcaccccagaaggcttacttttgccccttccatttggtatttacacgcaccaagtgctgcaatcaaatgtttgtgatcagtggcatgctggtaaatgtttaacaaccagttctggtgtgtgtaatggggtgccctgctttgtagcttttgccaattttgtggtataaatattcctgctatggctaatttcgagctaccaacagtttaacaactggctcacaaaattatgaaaatttaacaattggctctggtgagccaagcagactggctccagcacatcaccagttgtaacaaaggattaaagagagccaagtccacccaactacccaatgcaggtaggagtg

SEQ ID NO: 70919 - DNA, 1679 bp, Homo sapiens
aacaaacacgatgacctgtatgcactagcaccactggccacatcttgctctatagctttcctctcctttatattcatataacatacaatacattacatatacttcttttacaaggaatcatattctttatcttggtcttaaaaacatttcccctatctgtacacacagccttacaatcgttattttgaatgttgtataatatcttcttgtgtggctaaaacattatttaagcagtacccgactgaggagcactcagactgcttccaatgtttctccatgactgagctctgcaagacgcaaaaaggtgacaggcttttttaaaaactaccttttgaacctaattagctacaactgcagaataaaattaacaaacgaaaaactgccagggagggcagccctgtgtgtaggaggagacagcggaagttggccgccaccacagtactcctgcttccctttgtctggcggccccgcgggattggccagagctggcgccgagggactgcagagccacccacccccgtggctcctactgcgcacgcgtgaaaaaagccaggttgaggggaacgggggagcttcgggcgtagagtgtggggagtgggggatctggtgcaaattagggtgcgtgaaagaagtcacaaaaagcgcagaggccaggcttcccgccctaatccggcctttgtctccgcccctctgcctttgtttcggcccaagcgtcttattggtcagacatcttcagccccattggtccaagagccaaaggacggggtctgccccaagctgtgcctgcttccggagccgcaataagaacggtcaattgagatgcggctttcaggcatttgtttaggacatgcccatggcggggcttctaaaggggcttgtacggcaactggagcggttcagcgttcaacaacaagcttccaagatgccgcccaaaggaaaaagtggttctggaaaagcggggaaaggtagagcggccagagcgatcaaggagaatgggggcgggtgaggagcgaagggagggaacagacagtccatctccggagtccgggacggacgcagcaggtagccagtggccccacagtgctgccatcgattacatctgtaggaatacattgggctacggttcagggaccgtcctagtgggtaatggaatctgatggggatagttcctcggaggcgatgacttagggctgctatttcaaggggttattagagctctaaaattgggtcttatcaaaagccagcaataggaagtacacattggttatggtccttaaagttcactttaatgcttacagaatgacatgcccaccatcggggaaggaatcattcatccattgaacagaaatgtgtcaggcagagtgctaagcgctgaggatacacaaataagacagaaggctgggcgcggtggctcacgcctataatcccagcactttgggaggccgagggaggatggatcacgaggtcaggagttcgagaccagcttggccaacatggcgaaaccccgtctctactaaaaatacaaaaattcgccaggcgtggtggtggtgcgcgcccgtaatcccagctactcgggaggctgaggcaggagaatcgcttgaactcgggaggcagaggttgcaatgaaccgagatcgcgccactgcactccagcctgggcgacagagcgagcctctgtct

SEQ ID NO: 70920 - DNA, 1643 bp, Homo sapiens
aggtgtaaaaagcatccaaaactatttcataccttaaagttttatagcatcttccctgtcagaggaccaggatcattaagaacatgaatcctgagtccatgtaaatgtactatgtggtatgtggaataaatgaggcacaaaaatattaaatcgattggaagtggaggacagctagatagtatagctccttcaagggcagaggaagccaagaatagatattcctcccctagcctggtccccaaatgagtcctgggagacacttaaaaacagtggccacggaaatatttatataagatacttacaaacacaccggtcaatttatccagcatccaatgctttggagctgccacccgcttcagatgcttcttgggaccacgagcctgaaagttttagattgcaatgctgttaatcaggtttcagaacagcttataaaacctagtgtgaaactaaactcttagtttagtttcatcttcagcaaaatgtggacaatattaaagtatagtgttccgataaaacagaaacaaacacagttatttaacaaacaccgtgagatccataagctgcaacaagccttcttattgtaacagagaatattcttggttactatgtttcagaacgtttactgattactatctttcagaaccttgctaaagtgtttccatgttactgtttgaaactgtatctgcttagaggttagggtctttcaagaacaccatactagtgaaacgcacagcaacagaaatgagccaggagtctacctgtgtttctaaagttttcacaatttattaccgtctgtttttgacacgtatggaacaagattctgacatccgcacaaacacatgtgctgctccttcgtacactaaagccaaaagctgacaccaattttactttaaaaagagtaaggaagcctttttaatgctgtgtccagatgcttaccggccacgtatggtaaagtcaggccgtgccaaaaaggcaatgacaaagaaaacctttctccgccgggcacccccagcgcccaccaacctcgggctcgcagtctgagctcctggcccagccgcggctccggcccgggaggaaaagcagcttctcccgggatcaggacgtatggccgggtcagaaaccgaggccttcccaacagcagcaccagatctgcgcctccccaaccctaggccagcgttcgcccttcgccctggagcccgtcccggcctaccacggaggccgtgatcccttcgcctctgcccggccatccccagtaggaatcccgaaacctcgggcagccccggccgggggaggatggaggcggatacgtcctaagagctcgctaactaaacggcttaccatggctgcgttaggcaaggaaagaggacctccgtcttccggtgcgcgtagaaattggggctggagactgcgcgcgccggattttcagctgctccgcccagctcagccctttgctggcgcgccgggactctttcttgccatctgctggtgggaggtcagaagtcccgagttgaggaaccgccgcggaaagagggtgtctcctaagggcgatttcctccctcccctttttccgcccttcctcctcccatatttgctgagcgcctcttgtgtgccttattctgtgctaggtgctgggaatacaaaga

SEQ ID NO: 70921 - DNA, 1373 bp, Homo sapiens
actggcctaaaaacatcagcgtaaaaaaaaaaaaagaaaagcagaaatagtctctttaaagtttaattcagcaaaatccccgtcaatctcaccatcctgaacaaaggaacggattaattttgtttcaactggcttcccttctgttaacagttacaatacactttagacaatacagatacaaagtatcaaaatcactaaggtgaaagctaccgggccttaggcaggtgatggaacaccttccccctgcagcttgttttcccacgacttcagcggtcccctatgagtggaaactgcgtcctctcccctcctccgtaccccctcccccactcctacctgtccattggacgtcccgaagagacatgctgcgctctcagaaacgatatgagaacacttccttctgatacagctttaggtatctgatacagctactcgaaatttctgaagatttcccccagcccagtgtcctctccgcttcctaacgctctttcgtccaccgcccccacccccacccccaaagcccatggtctttcatcccgacttcccttacccgtttggggatcttggccagggagtcacacatactgacatactcgggactatagatataaaccgggaccagcgactgcccactgtccgccggttcctccggctcctccatcttccgcttaaaaccgttccgcagccaccttccagatctggcttttttcggactcggccagggttccagttcctgctcctctgatcggccgcagcggtgctccctggtcaacattccctcctattcttgagatcgccggagacactatcaccgctccccatcctattgaaggaatggatgggacttcccagaccagactcccctcatttagtgaccacagttcaaggaaaagggtttggcagatgtaaaagtccaaatagctgtcaattaggatcgattgtttttatggcacaaataagtagggtcaaaactaaccatccttgttgccctacggggccatttgagatgaagtcagaccagtttcacagcatgctgggagatgtagtttccggaggtttgagcaacggaagagccggggctaaacactaaaataaccgcgatttttagtttcagcgctaagaccaaaaaaaaaaaaaaaaaaaagtagcctcaactctttatgaattgtttcaatctgcaaacacatccatttcatccatttaaccatataaacacagatagaacgtggccacctagagcccccaccatccagctacatcagctgcctatcctaaggataggctttttttttttttttttttttttggtgggggcgctatttaatggcacaaatggtttgaaaagtttacacagtaaattctgtgatgcaatttta

SEQ ID NO: 70922 - DNA, 1018 bp, Homo sapiens
tcagggataggcagcggaaagagggcaggagatagactggccaactgataccctaaattctggactcttcttggatgacatgaaaaggtattgtttcatgtgtcctttctgatctagtaacaaatagctgaatggctctaaactggaaacactatccaagtaccccatgcaatgtggcaagatgattcagctatggagaaagataaattgttgcacaatgctctggaattggcaacctattcctgcagctaatctcaaagggcggctagacgcttgctcatggttaagaaagagcacacatcatgccacaggtccctcacctcaattttccacattcgtaacacccatatggttcttaaactgggaagaaaacccttctcaatgcactttatttgcagttggaggacttgaggtcacaggaagtaggttgaatcttggcttcaaagcttgctagggtggtgacccagggcaagttacttgactcactttcctcaatcattattgctaaaagtaacattcgaaccggtaagttcaggttgggctgtgccatatttttttggtgctttcccctgcttttccccagaaggggaggcaaacacattacaagggcaccacccttcagtgaatgagcagagtcttctctgctcatttcactatctgtccagtgacacttcaactgtcttcaactgacccttgtcacaccacccccttaatgtcattttccttggagagtgtcattgttgagaatgtgatcgctagcgtcagactgcatgggttcaacttccagctctatcacttattagatgattgatttggggcaatttacttaaaccctcagtgcctcaggtagcttacttgtaagatggcagtatctatcttacatggcaattgtgaagataaaatggctcacgctaagtgcctatataacaatggcatttggtatgtgctcaaatattggttatttaagagccattatgccaaatatttctatatttggtggggaagggagtttccccct

SEQ ID NO: 70923 - DNA, 2094 bp, Homo sapiens
cacttctaaggaaagatttgtaattttcaccactttacagatacagaaagagagatacagagctcaaataactgttcaagcaagtaagtagcagagctgggaattaagcccaagttttctggttcacaattgagaagtataacaataaatttcatctcttcatataagccctttctcgaggaagcatactcagagggtatgctgagcttttccctattataaatgttaaatgattcccaatgttcatgtttaatgtatttggttagtaatggtcaataaagttttagacagcaagagcatgcatctcagtcattctcctcatctgtaaaatgttaacattcaggtcttctaggtgtggccaaggagcccttctctcctttcatatccagctactataaagacattgaacactcttaggaactatgactactcctggcaatgtgtggcagaagacaccctccactgtgaatacaactgaaggagggtagtggccatggggagaagaatggcaaagttgtaaagaatgagtattatatttgacaaaacagctctacattgctggaacaacaagaaaattccatagaagtaattttcccaaaggaaaaaccctttctaccatttcaaactttaatgttatagttgaatatgctccatgtctcttgttctgcctcttcttaccatgttaccagttaaaccagactacatagcactacctgcagcataactatacacaattcactcattttacaaatatttgagtgtctaatatgttctaggtgctgtctgagatgcgggggataaagcagtgaagaaaactaaagttcctgcttacattgtaatcaatgcccgcccctatcctgggcttcacgtcatcctgtgcctgactctggtgagtcacggcattactcactctgtacatgcagttccttggccttggtcaccaaggacattaagtcgcaggttgtttgcacagcagcttggaaccgatctagccctcccttctgtgaggtaggggctagtttaggatggggagcagtgtgcgccaaaaggtgatctaaataacgagcaacttcatcaccacagcgagctgcaaggttagtggggggagggggaagagaaaagaatgaaaatattttagttactttacaatctaccccagcaaagagaatgattggctcctgtgctcacaacacagcaccagaagtaggttgtttttagctcatggaggaaaagcttgtgatcatgatataacctcatcactttaagatccagtgaccatggccatttactaggatccacctcctcttcaacttgctgagacaaggtcagggttcttgaaagcagtatgagcttgttttacattggagcaagcatttagcaatctgtgtatttgtgtgtgtgcatgtgatagtaatggtggcagggatggaggaggaacagaacagggagcttcaggtcacactaatgtgaggggactttggtgaggaagggccaggaaagggcaaaaatcttcttagtcacctcgtttgtttactcagcaaatatttgttggctgctatgtaccaggcagtgtactaggtgctgacatttcagtggtgaagaggatggatatggtccctatcttcttgggctccccttctcccatataccttctataacattatctctgagtatgggtaatggaaagaaaaacatacatatatcctgtggaagcttaatatttcagactttacatgaatattcacaaggtttatagttagaaaaacacactattcagatcgataccaaagtctgctgtatcagtcatgagtcttctggtttttgatgatatttactgatctctccagatgtctttctgtgctctgatgtgactaatgcgaactagtagagctgtaagaatggagctcatattcagtgacatcctaatgacaaagattgtaaccttgaatacaatctagagacttgagtggaggattatgaagaatatggagagaagctctttacccacagaagggctggcaagcaataaatacattcattttgagaacactgatgagtaaacccggaactaggaaagtgactcagaatgccata

SEQ ID NO: 70924 - DNA, 523 bp, Homo sapiens
ggttataaactttttgagcgcaaaaatggtattctatatctttgtaactccagagtatctagcagtgtaaatcaaagtacaagaaatatgaaggagtttggcagttagattatgaattaaattcctgattttgcttgtggtcatatgtaaaattcagtgaaacaaaaataggccccaacatgtacttgaaaattcaggagaagaaaaaaacaactgaaagcttgagttgaactttgaccaacagagacagatgaacattcctttcctttgtataagatgaagaaagcctctccaggaaatgacaagtgcccttgggaatttaagctctgctctcaaggccctaacaaaagataagagaggttttatgtcttgtttccctgagacatttgtgaactgttatgtgaagtcacttacagggcaaggagacttcctacagcctctgaaataatattttggacaatctctaacttacaaatgcttgattcaaaaatgatacttccataaaattaactgccatctcttg

SEQ ID NO: 70925 - DNA, 640 bp, Homo sapiens
taatcaagactgtgggattggtataaagttacatttataaatatatataaatcaaaggaatagagttgggagtttagaaataaacccttacatttatggtcaattataaacaaagaagcaacactcttttaaacacatggtgctgggaaaactgggtatctatatgcaaaagaaagaagttagattactattgctcatcacatacaaaaattaactcccaggcgcggtggcccatgcctataatcccagcactttgggaggctgaggtgggcagatcgcttgagtccaggagttgagaccagcctgggtaacatggtgaaaccccatctctacaaaaaaatacaaaaaaaaaaattagccagacgtagtggcgctgcgcctgtagttccagatacttgggaggcgaaggtcggagaattgcgtaaccctgggaggcagagattgcagtgagtcaagattgcgccattgcaccctagcagtgatgagggtgaaagcctgtctcaaaaaaaaaaaaaaaaaaataagaaagaaagaaaaaaggccgggcgcggtggctcatgcctgtaatcccagcattttgggaggccgaggcgggcagatgacctgaggtcaggagtttgagatcagcctggagaacgtg

SEQ ID NO: 70926 - DNA, 568 bp, Homo sapiens
gtgtagtcttattctttacatgtaagttcttaatgaatgaataaattctgttatatctgttctcccacatgccaccgcaaattgtacttttttattttattttattttatttttgagatggtttcactcttgttccaactcatgtttcaaatgaatttgttctagtgtaactcagcatctatcattttagctgttaagactgttactcatttatttgtcttaaattgtgaatgcaaagataacatgaactattgtcccaggggtcattgcctttgtaaatttgtttgtaaaatttccaaataagagccctttctaagcaagtgcctgccaaatatggctggatgatggtaaaatcccaactctcctttcacctatttggattttatattctttcaggaggcagctttcttacctttggaacaattacttatgtaagaggaaaagtgggtttccacagagaatgaaataggtactagctagttcagtagtccaggaagctaccaagatcagtcttcaagaggaaatattgtaacctggcaaccaaactctgtctctggtgttttctgga

SEQ ID NO: 70927 - DNA, 2034 bp, Homo sapiens
ctggagaatcgcttgaacccaggaggcggaggtagcaccgagccaagatcgcgccactgcactccagcctgggcgacagagcaagactccgtctcaaaaaaataaaacaaaaataaataaaagaagagggaagatggaaggacttttaggctcaagagcagcatctcaactctttttttttttttttttttttgagacggagtctggcacggtcgcccaggctggaatgcagcagcacgatctcagctcactgcaacctccgcctcccgggttcaagcgattctcccacctcagcctcccaagtagctgggattacactgagattacaggcaagcgccaccacacctggctaccaactcttttatgaagactcttttgtttacagaattaaaggaagcaccttgttctgaatccagttttgccattgacggactcactgtatgactaggccaaaaccctctggtttctgttttcccattagttggttgaagtacatacaccctcatctatcggaacacggggcttagtaaagtgaaaagaagtaggttctagctcattctagcacttttggaaaattgggtcacctctttgggccttaatttcgtcatctataaaacaggaaaaaatcagtcctcagcttacctgatgttgcaatgacttagtgagataacagaagtgaatggcagctttgtctatcatacttgtgaggtaaagttaatgagagtgagagatctggaaatagggaagaaagaaaggagtcgaggcaaagctaaaagaaatttgggttgggaaaggaaaaaagaaatgaagagaaagaaaaaggaaaagggaatttcaaaagagataaaggctgtgagaggaagtgcaacaggtcaggaaactgggggagggtccacggcaacggctgcggcacggcaacggctgcggcacggcaacggctggggcacggcaacggctggtgcatgttgccggcggaggcatttaggtagtgcacgacggctgggcgccgggcctgtttggctgtgacgcccacccccggctttcatccgcctatgccctagggctagtggaagacttaagatggcggcgtttgcacggagtgcaatcactgcgtccttacgggggttgcaaggcgtccgaagtatgagtccactaacaaaagtccagaaactcgccagttaatagtattgtggtgagtgatgagcctcacgttggctagagaagtggccgttagcgaggctacacactttgggatcgcgtggcctgagtcgggggagtaaccggcctgtattccatttttctctctccagtctcttcaaaatatcggagaataatttctttctcgctgatcgcctaacttctactgacgaagcttggaagttgcagaaggtagctcctaggagggatatatgggtcgttctttcctttttccttatttaaatgggtttttattgacaccatgtcgcgccaaaatggattccatctcctcagagctttcctaggaacagcctaacctcttgggcctaactttattttttttttgttctgcctttcatgtccagacttattagttttaattaatttgtttgtaacgtattcattatgcactagattaaacaatttttttctgtgcccactataccccaaatgtggagttttgggcaaaaacttaacatttgttcttgaagcatctcagaggtgtgtgtgtgtgtgtgtaatctttgggggacttacattgccaggttgattactcactaagaaaagagctagatttcctgttttcaaatctgttggcgaaattaagtttatgttaagcatagcatgtttactatatatatggggaagacagttaagagtgacatctaatatgttgttaaatgcttatgtgattaaagtaaatttcatgcattaccgcggagtatgaattgctgcaaccttttagaaaagaatctggcaatatttagggaaataaaaaatacagatatcacttgaacaaaaactggaattcaaaagtctgacttttaagaatctatc

SEQ ID NO: 70928 - DNA, 352 bp, Homo sapiens
acaattaaaccccctgccttatggcaaggacagagaactttctgtatcctggggttcttgccttgttgtactggaagaattggatcacacgtgggcttgagtgcaaggttttattgagtggaagtagctccaacagatagggttgccagaagagatagggttttcccctggcgttaggctgcttggttgcccaggctctcctccgactgcccaggccaaactccacgtcattcaaccggtcatttgatggcctgccagcatctgttggtgtgctcttccactggcatcctccccttgacgtcctcttgacgtccagccgcttgtgtcttctgctgctgctgtgttcctttca

SEQ ID NO: 70929 - DNA, 1432 bp, Homo sapiens
caattgtacaatgcattatagtctataacttattctgtagttcaaataaataaaactttcccctgttacagaaagacagccctcctcccagcaacatttcagactggatggattgattcctcacctgacataactctaaaatcctcactgaagaagccaggaagtcaaactgaggctgaagacctgaaagtacaggggactaaacccagaaagcagtatctgtagcaaaatagttgacctgatggctggttggctcccaagaatctctctgtcctggtagccagataaagtaatcaaagggtaatcctatacttggtaagccagtggagtacttaggaacaagtctcatgttaaagggcttcttccatggagtgtggttaatgtgcaaaaacatgtctataaataaggctgttaggacagactcaccataacaggaaataccagagagatcaagggtatccaggaaagtccaaagatgacaatgtaatacaaatagagcaattaagaggttacattcttgcattgtaagacatgggggttcaaagagaaagtctagaatttactggctagccattcttgccaagttctgaacttttattgatttgatgacctctttgaaatgtaataaaaacaatagtaacattagtgttggtgagatgagtatatcaattagaacaacctgtaggtttggctatccctaaaacaagccaaccttagaagaaatgtcctttaaaaagaaaaaaaaaaaggcatttcttcctaaggttggctctttaaaaaaaaaaaaaaagagagagagcgagattgattcttgctatgttgcccaggctgaagtgtaatggctattcacaggcatgatctcactactgatcatcatgggagttttgacccgctccattcccgacctgggctggttcacccctcctcaggcaacctggtgatcccccgtgcccgggaggtcaccatattgatgccaaatttagtgcaggaatccaatcggcatagctcactacagctcagaattcctgggatcaagcaatcctccctcctcaccctcctgagtagctagggctacaagtgcatgcctgcaagcccgcaaaaatagcctttttagaagtcatttctgaatggggttattgttcctgccaggtttgaaaaacatgtggacacaagagtcacatccaggtgtgtactagagaggcactgcacttaatcctacctacctaagctataaacttttcggactgtgtatccttggctgatcttcctaggagcacagtcaccactggatattgaaaaggacctaatttttacctccaactgacacatcattgataaagataatgagtcttcactatgtgctatcgggttcaatgttactgagagtagctgccctcaattaccccatcagaaaaaaataaggaatattatt

SEQ ID NO: 70930 - DNA, 804 bp, Homo sapiens
gggcacatgtgcttagcggccaagatgtagaaatgcaatatgaacacatctgaatcaagtggtggccacactcacattcccatctaaggtaaactgttccacctatagttctggagaacatagttctgggaagcagtcctagacagcaatgatttttagaatacgatctgccttgtagtccaaagcagaaagtatcaggtgtgggggacactttccaagtgccattatatatcattaaaagattcaaaaagtgactcccaagcagggcagagttatgccactgaaattcttacactaaggaataaagtctatgaaatgcaaaataaatagaatctgtgaaatgcaagaaagctggaaaacatgaaataaatacctttgggcactatctcatacactggggcaacaagcaacatttaattatgaatagctgaaaattgaaggggaagcagaatgcagactaagctaggaggtaaagtaaaggttgagtcaacaatgaggaaggcactgaacaaacacacagaggaattaaaaaatgttaaaggtggtatactaggatggatgacacaaactcttgcgctgacattcccagatctgtcttggaactaatttccaaactcaggaaactgaattaaaatttttctttaaattttaattgtctttactcaaattccttacttgaattcttatgagatccctgtccatcttagaggctgaccaagcccagccatgggtggtccaaattgcttaggtggtcccaattgcttggctggcccaagagatgtctggttcttaacaatacaagag

SEQ ID NO: 70931 - DNA, 3384 bp, Homo sapiens
caacaacattcagcgcttgtatgagtaaaaattgatacaacctttttaggaagaaatttggcaatagatactgagagtttaaaatgttcataccctttgatgtactaactccacttccacgaatgtatcctaagcaaataataaaaataaaacaaatgtattttcagtcttttattacaagaaaaaagacaataacctttccatcactattgtatatttagatcaacacgaaatactaataatgggttaaaaaaaaaactactgcagtaaatgactggttagatgtctcaaagcattagatcagacagaaaatcaggcaaaacaagaagggtgtgtccagcctgccgcagtcggccattttagaccctctgcagaacaaaaagcacagaaaacaagggtagttaaggatagccaccccactaggcaccaaatcaacaattctttatcttttgtctcctaggtatgtaaccctgtagtctgcacagtcagaaacagaaaacaggtcttctttctcaaatggttttggttagttacaaacaaattttgaaatcataaaagaaggttcctttaaattcgccccctctttttagggaataaagcataatgcttaaaagcacatgcttctggagccatcccacctggataaaaacccagtctcagccattcaactggctgtaaagccttgaacaaattagtctcgtgtccctcaaatttctcatttgtataaacttaataacagtactgtgtttcgtaagattgtcgagagtaccaaatgagttacggcctatgtaaaagcacgcagaccagaacctcgaacgtagtaagtgctattgacgtttaatcattattacagatagagaaataggcccagcagccgggcgtggtggctcacgcttgtaatcccagcactttgggaggccaaggcgggcggatcacatgaggccgggagttcgagaccagcctggccaacatggcaaaaccccgtctctactaaaaacacaaaaattagccgggcgtgcgcgcacctgtaaccccagctactacttgggaggctgagatatcagaatcgcttgaacccgggaggcggaggttgtagtgaattgagatcgcgccaccgcactccagcctgggcgacggagcaagactctgtctaaaagtaaataaataaatgagcgagagagagaaataggcccagagaaggaaaaggaccaccatgaaataatagctaggattactgggaaaagatgtttttttcagtttttaatcctgtgctccttctaactatgtctgtatctaagtgctaacttactagttttagcgattaacagcaagtcttcagagagtcatgacagtacatctgcctttaaaatagaaactctaatcttctcccttgacaaaaccgtgctgaaagttctacagaagaaaaaataaaggaaagggtgaaagcccaggttaccttcataccaccactgccattaactacttttcaatctttctccacgacagtatgagtcccaggcagccataggtccaaattccaggtttacggcaaagagtaacaagcatttggaaacacatccaaatcctcacgcctatgttctcagggaagaaaatcaagagctttcggccaacattaacattggattctcacactacaaccacagtgttttgctactctgatggggtgactgtattcagagccaagtacagcgacccaagatcggaaagccagagagccctccgaatgcgtactgcccaaatgtggcctgtctccaagtgctccctttttacgcatttcctacgcaccgccagctgccgcaaccttttgcagagtcatcatcgcctcctcatttttgtacccacttaccgataggccactgagaggctaagattctgggttaatttctagtggatctggccacagcataggagaactccaactcaggttgatcccttcactcagctaaaaaggtagttctctgcaaggcctgctagcccaagatggccaagcaaagacagcttacctcccccctcgccattttgcaaccttaattacccgaatgctgagcgcctcccctccccggcactccgtctgaaatacgcatgcgcgccgcttcctccttaccgttctccccaaccatccagatgttgtctcaaatatgcatgagcgccacctctacctcccaaacgctggtaccaactcctagcaactttgcgttgttaaatatgcctgcgagtccttcacttcccgaccttccaaccctccaaccccgacgccattcaagccttgcgcatgcgtgcctccctctccccacccccgccccactggagcccgtccccttaactcaggtcttctcaaatactgtaagcttgagcgccgcccctcggcgccgcgcctcctcatccagcctctcaaataccctgcgcaccgcgatagtcctctctcttcttgctcccatttgtatacagtatgcatgcctgatgctatctggacgtgtttctcgccacaattctgccccagtgcccaaggagagccattaccagccttccctaatgcgagtagatgcgataaactagggaagttgaatcggggaaagaaggcgttgcaggtgatcagagtgaatcccagatctagatggaatcggtcccaactccaagggagggggctagagtaccccaggattcacataagaccggtcaacctgaacaaaggcaaggaaaactttcacaaaccatcggatgaacataatcctaaggcctcgccctttaaatacatctgctacaaatgacgaaccacaaatgttttaaacagggaacattatggaaaacaccgatgctcaggtgccttgactctagttagaggaaaggaacccgcattcctttcacaatgggaagcaaatgctcaacatccttttggaaaactggggcctgtaacgtattccattttttcctcccgtgaactggaaaaatgcacaaattaaggatcttcctggcccaagttccctccgccgccctccatgttctgttcttcccctacatcgttcctttacctcctggttgaattcagtgtcgtagcaggaattcttagagctggccgtcccaagatggggtggagagagcggcatgaaagagagagagagagagagacacgcctgaatggcagcagcaggccttagcggcaatggacagcaggcacaggaccagctttgcctcgagccgcaacgctgatgccagaaaaggacaacctctccagaatcgccgcagtgtgcttccagcgcatgcgctgctaacgccccttaaccccccctccgcgccccgcctcccccacgcgccgctctccagcctctaggagtctaacccttagcggtccaccgacctccttca

SEQ ID NO: 70932 - DNA, 595 bp, Homo sapiens
aaagtctcctgagccctccccagccatgcttcctatgcagcctgcagaaccatgagtcaattaaacctctttactttataaattgcccagtctcaggtatttctttatagcagtgtgagaatggactaatacactccccatcttgctgctgagtaatataacctacacaaataaactctatctctgattcagccctcagctttcccctgggagttcccttgccctttccccttctgagtaatgacccggtacagttgcctctggatagtctcctgctgtgaaggacttcctctctcaagcaacctctccaagtgccacccaaacaaagcttgttatgtgctactgccaccttgtggttatcttttttggctcagcctcaaaatcctacaagtgagttctataggatcctggtgatcaagcaattgggaagaggtctattcccatcggtaggacaataaataggcaaattgatcttggaaggcctttaagtgattggaattcaatatttggaatacctctgcatcagtttggcatggcatcactctttgctgtacttcattctatagtttttgtggtctccctatatacctcattc

SEQ ID NO: 70933 - DNA, 4055 bp, Homo sapiens
ctcaggacgtctatatccttccacccagctccgccagccctcaggtgcttaatgactgtatttacaggcatctagcgcagccacgcagccccggagctgcatcacctctggctatgcagtctttcacttatcaggagggttaatgagatgcagggtagaaaggtcttgccactcgcccgcccgctcgtggaagccgagtagcttggtaacgacaccacgacttcacgtttagtgcattagacgcgtagacccttaggggaggcagagcttcccggtatcgccgagcgggccctgagggctgaggctgggcacccctgcgcacccctgctgagtgcccggccaccagaaagacagatcccccacctttccttctccctgacccggcgcgcttcctggggaacaaactctcccttaccctcagtggggctggggcctcagtctgcgacatacagtgggactcccatgtctgcatgcctgaggtgggcggaagggggcggtgggtgctgggaagacatccgtccgcttgcagctccgctgagtctccagcacctgaaaagccgcggccgaggcctgagggaccagcccagccgagatatcgggggcggggcagcccaatcccaaactggcggctggacccgactccaactcgttcctcctaagtccgggacagattgtcgggaggagcttgaactgagcttcggctcccgactgggcctgggcccggcccccactggtgccacctccctcccttcctggcccggctcctggcccacactcggccctggcccggccctggcccggcccagacccggcccggccctggcccggcccagacccggccctctgaggctcctccgggctccaggttggcgcaaacaaagccctgattgactgcccggaggggcgggcctcgctgcatggccgcctcctcccctcccaggccgccagggatttgccgggaagagcgggggcagggggagactcccgggggtgcgcaggaccgcggggggccgagtcctcgggctcgagaagattgtgtccacccgctgtccgaggcccaggctgtcccctcaggtcgtcctcctcaagtccaaggagggacatgggagctcctgagggcagggtggggttcctcgcgggccagctgtcgtcctagggtccccggtgccacctcagttgcgggctgcttgtgaggaaggagggtatgggagcaaaaaataggaggggtcttcccgaggctcggggttgatcagtgtcggttctagagcctgcggggaaaagagggcaggagaacaggatagtttgtgcttccttttttccattttaacttttcctctaacgggcatccgggcaagaacagggttcagtagtttgggaagggagctgggggaggcagtggcggctggagtaggtaggcgagtaaaaggaggaggaagggctggggagaagagcgaggctgtagcggctgcctgttgagggaggaagaggtggggggtgtggaggagggggaggagagagagatgacatggggagaggaggaggggggttggacgtgggaggaggaggagagggctcgagggaccgtctgtcgcgggacgggctggccagctggggcgcggagcctggaggaggaggcagcggcagcggcagcagcagccctccgagcagcagcagctgcagcagcagaaacaagtaccagccacaaagcggctcctctggcccaagcagccacagtccccccgccgcgatggcgctgcaaagccaggcgagcgaggaagcaaaggggccctggcaggaggcagaccaggaacagcaggagccggtgggtagcccagagccggagtctgagccggagcctgagcccgagcccgagcccgtgccagtgcccccgcccgagccccagccggagccccagcccctaccggaccccgcacccctgccggagctggagttcgagtccgagcgggtgcacgaacccgagcccacgcctacggtagagacccgcggcaccgcgcgcggcttccagcctcccgaaggtggcttcggctgggtggtggtgttcgctgccacctggtgcaacggctccatcttcggcatccataactctgtcgggatcctctactccatgctgctagaggaggaaaaggaaaaaaatcgccaagtggagttccaagcaggtgagtggccccgcacgccccacttggcattttgggcaaggttggccgctcccgctgccaccgaccccatacctcccggtccgaggcgcccctccaacgcgcctctccgactcctccccttaccccttaccccttgccccttgcccctttccatggctctcctagggtgcgggttgcggggctttgggcagcttggactggggagactaggtgcaaggcgtcccgggggtacgaactgggacattcattgatccttggcaagcaatggacttttttttgccctgggacaaatctaaatgcacctttcaggtttaaggtacctttgcccctgtgtgctgggggaaaatatttgcaggactttttttttttttggaggtggggagaagtcatgaggagaggagagaattgagaggcggggcgggctctgagagaagcactgtaccgctgatctccgcagcagccccccggttcctttggggaaacggaggtgttttctgttaaaaacactttaggaatcctgatgactatgagcgaagagtcaaacacatggcaggcgtgcgtgtctgcaagagagaaagggagggagggagttcgagtcggggtgtgagtgcgtctctggccgccgccgttacggcccagctgggcccggcagtcctctgccgccccgcgggagtgaatggatctccgtgccctatgagccgagccccagagcgggcggggaggcggtctccgcagtctcctgccagagaggcgtgaggccgcaggcaggctgggccctgctgctcactccgcaccgcccccaacttcagccctgccttccccggcaacccgcgcctctctgctaccggtggggtgcctcgttcggcctacagcctgagtgccagacccgccattccagctttcccctggagctgacttgatctcagacagagttggggggcatagccctcgctttccaggccagtggacgcaagaccccaggcgtgtgcgctcttctcattgaggccgcctgtgagctgggagaagtcagaggaaccatctcgctttcccagcaaagccgctggcgaaatccctcagcagttctggtgagggattcagacgaagacgggggattgggatgccctctctggcaaggcttgctccctctcgtggctcctcaggacagctcgactcttgccaccagccccaagttcacaactcagaatatgtggcttttcgcagtgttgccctcggactgaggagttccatcctctcgccaacctccaacccccacatatttctactgccatttgaggggacctgggaattattaagtgaacatagaaaccttgaattctggagtgtccacctgtggattccctgggccctctccaggacttgtggttttagtttgcagctttgctggacttccctggcagaaggggctttggggatcttggtgcctcagaccttgtgatccattggcacagcagcggtgtgcaggccccgatgaagatagtgcgtcagtggttgtcaaaggaagtctcttgactacccaggcccactgtgatgctggaatggaggggtcctgggacagtgtagagcaacttctgcggggaagatggctgccacagtcacccctgggaccacctttttccctgctttgatgcagttcaggggctcctgggaaagcaggcagtgtagggactcatgctgttgcctaggttacctccaagggcacctgctgagcattgccctgtggttgaaggcaggctgttggccttcaggatcagtgagtggcaaagtctgagtgaaacttgatgagaagcagtagaggctaggctgaagctaggccctggcatttatatggtgtgaggaggcctagagctgtgatcttag

SEQ ID NO: 70934 - DNA, 2721 bp, Homo sapiens
gaggaactcttttaagtttggcagctgttttactctgggaatttctcctctgcctaacccttctcccatcaacaagcttccttcacttcttccctcccacctccctcaaaatcccctatggataatgggatgatctttgtcttgcaacagggcactatagacgaccaggatggtccatccttcctccaccactagtgacagcaacaaggctagcttggggaattttagcatcgctcaaagccatgactaataaatagataatttaagcaaaactcatgcacttgctatgctagcaagcatcaaggcaagtcctttagtcacctccttccaaccaaattgctttccctaagccctttctattgagaaattatggaccctccacccccattatatgccccagggcctagcacaagggctggctggcacataatagatgctcaataaatatttgttgaatgaataatggccgaacagatgaagactaaacatacctaaaagctaaaggaaataatgctagctgagtcaggagacctggatcagccactaatccatcttgtgaccttgagcatgttcctctctttgggtctaagtctcttcctctgtagaattttgcactgaactcagtgatcttttaggggtcttccatttctgggagttcataattctgtgatccgtactcttgtaccaaataccacttgccgccaccacccctgctctgccccgccccacccaaagaagtaaaagaaacttccatctagtcatcagatagtattgggatcatgctgatagggaaaagaatataacttggggttttggaccaagccaatatcagagaagccactgcttcccattatgccaatggggattgctgattaggtctcactcctatgacacaaaggcacaacattcaaggtcctccgctccttgcctcctctgccttgtctttgatgtcccatgagaagtatgttgaccagacaatatccccttggctctggtagtggttggagtcagtaagctgttggagatctgggagtcctggtcattgcagaacaaaattcttgtccactgttataagcacataggtcttgattttaaaagtcttatgcagccataaaaatatacacagaccaacctgcctgggattaaagggaactaggcagaaaaccagaaaaggtagagtctctcttagtgggcctttccctttttgtctctctgaattgggtttccatggggatctgtgggtaaaacacatgaactttaaacactttttaaaaaaacttaaaatgacatttaagagacctccaatattggaaatcttttattctctgattcaaaatatgtaaccagtagaaaggtggtttgtttcgtatgtgttcttttagtgtgatgagtcaggctgaagctgggattgggcaatgactatgtgagtatgtggtgaatttcagaggggaagtgctgtttgaggaaaggcaaagcatatttatcagacaaagaatgtatgaagcctaaagcatgtgtttaatactttgagaagctggttactcatacctccctcctccttgacacatacagttaggctccatgatcaaacatcagatttaggctagacaatctttgaggtttgttccagttctgatgttttttctctgactgtgtgagattattcagacttgcaagtgcacttttccaatgaatcccctgtggttactttcaatgttttattccaggcaaggaacaaatgactgtaaagtggctaaacctcagtaggcttggccataaagtgacacggaaaattgatagttagtgatgggccatgaactatgaagtagggtgaaccctttggatcctcaggacccaatagctcaaaaatagatcaagaaggaagtgtgtacatgagggaaaattgcttatagtgatgtgcctatttgcattgaaatgtcatcccttggggggtccccccacctgtcatgggacaaatgtcttatagaagaatgtgacagcaaatgtgccacactgatcagatgcttttggcatacttgaaccttcctggtgttataaataggagggaatgagcctggacttaaatatgtcatgctgtcagaaacagaagggatgtgctaccattaataaggggcttagaggatcctatagttaagagccaaagaagccctctatttcgagaagggaaaagttcaatgactgtccgctatcagagcacaatacgagctaaattactagcagtaggttggtccttgacccctttggatcatagggaaatgatgataatagagttggcaagcccccaaggcgccctccagactggacatgcatggaggctgggtcagccagtttccaccacacttccaattgccagtgtactctcttccttggagcattaccaccacactctcagcagggtggatttgggaagtggcctggaatatggcaggccttccctctcatcctgctgggaatagtcttgtccgttcccgttctaggaaagagaagcagagagatgccaaaggctcaggtacctgttgaatcagagagtgagcagtgagcaacacagaagggtgaaggcctagagcatgtggggacctcaaaggttatctagtaaaatgttttccaaaatgtccattataacccatgaaattaatttagaaggtcacaataagcattttaaaaataatatgcactagaaaatttcagagtttgtcacgc

SEQ ID NO: 70935 - DNA, 1217 bp, Homo sapiens
tatcttacatattcagtaggtttgaggggaaagctatacatatttatgagaagagccaagtgcatgcacattggctaaacatgttgtaacatacatcccaagttcactttggggtgaggttttggcattaaaatgaggtataatttggctttttatgtcaaaactgtcttgggacacaagacagtttgtgcacattctctataaactggctaaaactggcgtaaggtctgccccacccccatcagactttggatgaaggaggaaacacgggtatggtgacatcctgtcccttatttctcagagctggtaattgaggtccagggaacacagggcatttgaccctcttccaggaaccagaaagctggaaactcctgtattactcagttgctagtaatttaaaacagtgcttattgcagagctatattctggaatagaatgtatattttaaaaaaattttccatatgttattggggtacaggtggtatttggttacctaagttctttagtggtgatttgtgagattttggtgcacccatcacccaagcagtatacactgcaccatatttatagtcttttattcctcgccccgccacactcttctctggaagtccccgaagtccattgtatcattctcatgcctttgtatccttatcgcttagctcccacatatcagtgagaacatacaacatttagttttccagatgtacaatttttgatgaatctctcagaggcaattatcaacctcaatgtaattctgagcttcccccttgcaccctgtttactttgtttcacaattggacaaaatgagttctagagaacaaaggtcatttgcacaaaattctacagcaatcgattgcagaactcaaagtaaggttcttttaataataggtatcctttataaatagaatgaccggatgttccagtttataaatattgtcccattctaattattaaaattaaaagtccttctcaaaattagcatggtacatataataaaatatgtttccccccatttatgtgccattaatttttcttcatatattaggctggtgcaaaagtaattgcagttttcgccattgagagtaatggcaaaactgcaattacttttgcaccaacctatattgtttcatatagtctttacaataaccctacaatgtgacaatttctctcattttacagagtaggagattaagtttgaaaggttttagttacctgcc

SEQ ID NO: 70936 - DNA, 742 bp, Homo sapiens
ggttccttttcctaacctcacagggttctggtaaccataaggcctccaacccaccatttaaaggttgcaaggccgagatgctaaaatgacagagagccagacagggaagtagatacggcatggtgatggaggagacctgagaccttgtccctaccctgctataaaccaagtctgtaggcctcatgtcttcatctgtaaacaacagaaagatcattgatcggtctttgcttaatacctctccatgcctagtgatatggggcagggagcctgggaaggggactgtaaaaacctcgaggtaaatctaggctgggaggcactgccctagagttcaggaaggccaagtccataatgtcattgcctaattgaatactagaaaagcacccctggaggcaggtgagtttggctgagaggtaagttgggatttacttaatgtctaaagagagagagaggtcaaagtaaatggttcagtgggcagagagagaaaagcaggtctagggcagaagggagatctcagggactttcccatggagccccaggggagagactcagaaagatgagggcaatagaagggaagatatgacagaacagtcttatcagaggcttatcaggtatcacagtgcagtagaaggagcacaggattaggactccaaagatcggggtttttatcctggcttagttagcaattgacttgctgtatgtccttgagtagtttatgtcctctctgagcttcagtgttctcatc

SEQ ID NO: 70937 - DNA, 627 bp, Homo sapiens
ccaaaaaaaaaaaaaagcttgatttgtctagccaaaagacgggaaaaggggcagcctagcaaaacaaaaaagctttaaacaataatccctctactccagcctaacaccatgggaaaaaatgcaccccacttgacctttgccaacaaaggcctactggggagccaagacttctacactcacccagctgtaacaaggtgctccaacctccccgcctcccatgctgaggtggtgtcagagaaaacagtaggaagccaggaatttcttcccctctcagcagtaacaaggcctacccctcccccatggtgtcagtagagaccacatagggagcctggactttcactcttgcccgggtataacctccaaccacctctcctactcctggcaaggtgccaaggtggtgtcagtgaaagccaagtaggaaactgggactttcaccatcacttactgaggtaagaccacatgggaaacagtaacaaggaacccctactcctcccaaccaggaagatataaaaagaagcctagtagggatcttgaatacccacccctgctcagcaataacaaggtacccttccttcttagagtgtcaatagaagctaagcagggaacctggatttccacccccatttg

SEQ ID NO: 70938 - DNA, 3661 bp, Homo sapiens
aagacatgggacatttaaatcctcaaggagtttggaacaaaataaacagatctaaaaatttggtttgggtatgtatgttgcctacaaggaagaaatagtcttaacctgattaatagcagaaagtttgacttcagagctgaagtctcctttcaaatcaaatttctgccaggttctatgctctctgtgagagcagacattagaaaaagagctatataggggtttggagttggttgactatttgagattggatttttaaacaagctctgaagtggaaaagtggttacttcacaaaatgagaatgtggttacttgctgagttggaatggaggccccaccaaggccacagccttgctacaaatgtgccatattgaaaactggcattaataataatccaattcagctctccttccctctcccttatgttattgatggggaacctaaagggacttatatggctggctgacacagcctggcagtgacagagcctggaattaaggatgatgcaggagacagacctataagaatgacaaagctgagagtaaccttagagtctcccttgtccatcctgtgcattgaatttaagtggagagactgaggcctagaggtaggaagagactgcagtaggttcacacagttcatcagtgacagagcaagatgagacttgaactcatgtcattgacttccagtacagtttacacccctggttttacagatgaagaaactggccctaggagggataaatgacttgcccacttcattcaacaactgtgtaccaaacccatttccataagtgtgtcagcaggaccagctctgagcaaaaatgaaagtttagcaaagtttaacttttagcataccccatgtcttcatgattactctcacccgcaactgacacatacttttggtattctgtctcccagtcactccagaccatgcaatcttggcttggagacctggtttcacctactgtccctccacccccagcaactcaagaggtacaaaaaaaatccatctccaaatggccacatactgggcagggcaggggcaaagagaagtgactggtttccggttggaagaaggtggtttaccacccagctcttggctattgtttctcctcagactcagtgtagacaccctcaggctggcttcctcatctcctcccactgaggctaattactctgtcccattgcagggccccaggctctcccacctaaggtctgccccgctcccctagccccttccccagcagccccaagggtccagtctgtgtttgatcacccaggattattagatttcaaagctgtggaatcccataatttttacgagcatatgctctcctctagggtcttttcacgtctgaaaaggcggccagcagctccctgccacttctccacagtagcagtgcaggccagctgacaaggattacaaatccctagtgtctcatagctggcgcctagatagtgtgggtgacgggtagaataagagcccttgaagcaagttcagaaattctaataagctgaaatgcagcagagactgcagaggcacaaggaaagggattagatacccaaatcctgcaggggttcaggaggctatgcttcaaagcccctttgattcctgcctttcagctctctctagcggtcaccaagcgcaaagttctatgcctggttttcaagtcatttaagcagtcttttctagagacctgctgcgtgtcagacactctgctagaatccgggaacttcaggaatgaaaggaacataagtagaaaaaaaccagaagaacacaaagagtttgtactacctaacttccaagatacccttttcttctctgggcgccagtacccagagagtaccgaccttagcgccaaaattcggtcctctctgaggcagatcaggagccaccacgcccccagtgaaatggaggcggcaggaatcccacccccaacccctcttcctctccccacgactatcctcccgggggcgagagtcgcccggaagaactacccgcgcctcggcattggtttcctgctgagccccagccggataaaattagtcgattgctcacactaacaagtgtcagagtccgcgtccagctgagtgggtggggagagcagtactgggccgggccgcattcccgcccgggcctgtcagagcagcggacagacagcacctgtcgtgggcctcctcgttccctcactcctgccagagcctgtggcccccccgcggagaccggggactacacttgggagcatctttccccaactctcgtcaccgcagagaccgcgccgagcccacctgccaaatgttaatacactggaatgccaggggaggggaaaagaaggttgcacttctactctcctttcccaccacacacccacccttcactgacctcgccacgactgggccctggcatccgggcctgggggtgctaatcgacactatttcccgccaggtccccatgcccactccacactctgggactgcctgggggtggatttggccctggcggtcgctcctggtcctgccgctggcctccggccaccttgggcggggacgcggagagtggggttggctcctcccccgccgcgggtctccatccatttccccatttgggaggggtaataacccgggagccgcgccacggaaatgcatcttcccctgctattcagacgggaatccgcccacccatgacaaccgcccttcccgcctagggaaagggggcgggaagacctagcctcgggccctgccaactgccagcaagccagacggatagacagcagctgctgcgtgtccgagctcagctcctcctcgatcccccgccctctacctccctgctcgctccaccgacaccaggggccgtagcggcgacggcgccccacccccagcgctcggtccggagccctcgaggtgatccgggctgggcctgtcgaggatcttttacaatcggcggccccctattctctcccgaccggcctcgtccctagcgtcccaagagcgggatcaggcggctgctagcgaaagacctacaggagcccagactcgaggcccgccaggatgcggagactgagggcgggttcggccgccaggaagcgctcccgcccggggcagcaatcctcctccgccctcctctgcaacctccaacccgggagggccctacggggcctcctcctccacacagtgggtcagcccagtggggctgctttctgccaaagacttggcccacccttcaagcgccccttcccccagtctccataaaaactctttcagaactccggggaatcaaccatgctggtgggagctcccagctcaggcctactcccccatctcacagttcccgatcacacaggggagcacgcgggatttcctaggcttgagaaccctcctccaagcctggacggagcctcaagagtggtgagaaggaccagattgactcgaagagccgccctcctcagtttgctcctctcctacactcctctaccctagtctccaccgacctgcttccttctgcgcttgcctagtggggggtgaaggagaggacaactaccttcacttctccccccaactttcacatacaccctccgtcccttaaggtggagtctcctgggaggcgggcagcctcgcagatccttctgccttaaggccttgcaaaggcagagtttcctcctgtca

SEQ ID NO: 70939 - DNA, 2048 bp, Homo sapiens
aggtttattatttcttccccctttcaatcagtccaaaacactgcggttaattctgattcaggaaatgcgggctccttacttctggcaaaaaatcattgtggggtcttgcaaatggaagatgacaatctgatacaactgcttcctcttgccccaaaatgaaaaaaaaaatgacctcaataacaagactgctaggcctcagattcccagactaacctgtggaataagtatggtgaaactgtctagggaaggaacgtggctgtctcctccatcttgaaattaatcagcataagggaaaaagggaccgagtattcaggaagcagaagcccaaccggttaatactagttactaagctatggcatgcgtggcaggtaccgtctgcagaagcagagacccccctaggcttttttttttttttttaatgggggagggattgagttgttggtggattaaacacaaattaacttgaaaatttggcccaattccatcccttatccaggagaacacaacaaacacctaacggcttttccctctcttttgcggggggatccttccagtgatacctggcaaaggatatgccagggttattcgagcaagggagtaaaccacatttgcctcagatcctcagggaagatgtcatcgcggccccagggggcgcctaattggtaataccctgcagaagggctcaaaatgaggttttggaaatctaaaggcccaagagttgccagcatctcacttggggcagcctgattttttacttcccttttcccaaacccaagcccgccatggaaaacgcggggaggtcagggaagcctccagagaacagagaagaaaaagcctgagacgttctaagattctgacgcctgaggccaaaactcaaaaactgcctcccccgatttcctaaggctccggagggcctgggctgcagctcgcgcggccaccgagaggaagtactacccacctccttccccttcaaagagcctgtcgactataccactcaactaaaatggcagcggcgactacgccacggagccccccgcagcaacgggcctggggtccggaggcggcgctgagcctctgccacgacgcgtcactcgggccattttgagagaacgcggcagccgcggctccgctgtcttcctctcgctctacatcatttctcacaggattcccaagtcttcacttactaggttttagggtcaggatccgactcggttggttcggccgccgccgccgaggctgctccgcacctccctggccgccgctctcaagcccgcctccaatgagtagctggttgagacccgcctctagcccagcgcctgctcggagacgttgctcaggcagccattatcttccccattgttaccaagcagcgacaggaaacgactgcccacaacaggaagtgatgatgccgcgtcccggcaccgcagccccactcccagcctattagccaatcccagtcgattcctcgaaaaggctccgcgggaggaggagggggacggcagacgacgcggcaaggcgggcggcggtttggaaaaggaaagctgttatgacgcccaccatgtgacaggccccaccctcctccgccattttgaattgtggcgagaaatttgcgttctgagaattgtgggaaccttcgctttcccattttgaaaactgaaggacgtcacggtctgactgcttgaagacattttcagagagagagaaatgtgatattagtctaccctgacatcacatcagttcacacaatccgtgcagaccagttcaaaaagtagcctgcgttttattcaacatgtatttacacagtgccaactgcatgtcaagcaccattgtagctgcttaggaaattaaaatagaccaaaattaagaaagaaaacaggccacgttcggtggctcacgcctgtaatcccagcactttgggaagccgaagcgggcggatcacctgaggtcaggagttcgagaccagcctggccaacatggtgaaacccagtctctactaaaaatacgaaaattagccgggcgtggtggcgggcgcctgtaatctctgctaa

SEQ ID NO: 70940 - DNA, 1459 bp, Homo sapiens
ttttttacttcttccttctgttatgcagacaagctaactgaagatgcggttactgagatataatttctctgctaggtcacaaagtctgaaaacatgggccttacgtgtgtaactgtgtatcatcacctgccacccccagtttttcctggctctactaatcacccaaagttctgaatgcagaagccccaggggcccccggaagatccttcaagctggcatccttggcctcgctgcgggggcttagctacctgtgggaacccacgtagcaagggtgactcaaagggttaacaagcagtggcgccgcagagtggcggggagtgcagccaatagggtgtctaggcaggcagtacgtctggtgtgggcgggagtgagccaaagtgtgctaaaggaaaccaacagcggcctaggggtgaaaggacagccagggttagatgttctgaggaggcgggagcaaccgagagagcacgtgagcatctgtcctttctacccgttcctctttatctttagtgttcagtagcagcggggatagcccggggcccggtgtatggccacggagttacagtgtccggactccatgccctgtcacaaccagcaagtaaactctgcctcaaccccaagtcccgagcagctgcgacctggcgatctgatcctggaccacgcagggggaaacagagcctccagggccaaggtgattctcctcacggggtacgcccattctagcctgccggccgagctggactctggggcctgcggcggctccagcctcaactcagagggcaacagtggtagtggtgacagtagcagctatgacgcaccagctggcaactccttcctagaggactgcgaactctcccggcagatcggggcgcagcttaagctgctgcctatgaatgatcagatacgggagctacagaccatcatccgtgacaagtaagccaagagcggaaggggaaagggaagtggagggtcttgcaggctgtgggcggggattggaagtaaaagggctaagagacagtgttcttggccttggcaaactttggagattggggtaagaccttttatttggtgtgtgtgtgtgtgtgtgtgtgtgtgtgtgtgtgtgtgtgtcgtgtaactcgaacgccaaccttctctttccaagttccggtgtctaacatcactttgggtggggaggaagactttaggtagcctctgggctctttgtctctcccaggaaagacaactccttggccattccaggcaggtaaactcccctatactatgtgggcagtgcttgtccacatggtaaacctataacccagaaatggttactatccaaggttatgcactaccaccaatcacctcaggttcataaatagaaataaagcaatttcaaggaaattctattcaggccctgaccctttagtatttgctactgcaaacaaggtcttttagtcttggagttcaggtttacttgatc

SEQ ID NO: 70941 - DNA, 1517 bp, Homo sapiens
tatgttgaggaggtgggggaactagtgagaacccaggcatgaccctgtgggacgcagactgaactgccagccaatttcatgatacaaaggcttctttcttttatgacaaatggatccaagtaaagtcctgaagaccataacaagcagctactaaagggtctcttggcagctccatataggagcatgaagactgggctgggtaagagatgaacggatagggatacggcctactcacagacggcattgggacctgtagcccattttgctttggaccatttaggatgtaagagagaatgagaacaactaggtccaaatcccaatccacactgtgctgtggtctacctaaggagtcagctcaggaacggcccttacatacacacacatcactggcagcccttagtgtttccacacagcagggaaaaagcaaccttcccagcagcctgtgcaaaggccaagcagcttagagggccctggagaaaagattcagaaggtataaaagggcatagggtgtggttgagcacaatgaccagcaaatattttagacttctgcttcaaagtgggcttgacctgtaccgacaaacaaggcagaaagagccccagcttggttttggcctgacttcagagggggacaaaaagtgcccacaaacagccagtcatgaaacaatatttgctccctctggaaaatcatggcctttagcacattccccagaattacgtcaaccagggaacagtgccaaaaatgtgactttcatgtttctgcagcaacagatgatttcctctctccacttggctttttttcttgtatgtataaataaaagagccagtcaatcgctcaaaaaatatgaacaacttaagcatttccaggctttacaagtagtaattattaatagaagcaagtgaccatgcatactagaaatgttatttcacatattccttttctggtttcttaaaggagatttatatatgtggccaggctgaactgaaataataacagttgacacaatgaccacatgaaaatggacttttcctcacttgatttatgtcaccaaacttgcatataaatgttccattttgtctgctcgaagattcttaagcctggggacagaggacaggaggtcacccagcccacagagcctgagaagagaatccaccaggaaaaaaaaaaaagataatggaaacatcagggaagctcagctgtgtaactggaccactgttttttggacttagccaggggccattgtaaaatccaacaatgggtgaaaagcaatattcattgctcatttcttgccttcaacttctatcccttcatacttaatccttgtctaatctgcctttcatcctgatcaataacatttcttataactctggaagcaaaatgtcttactgcttgactaccttgactgatctctttcctttctctccaccaaatatttgtcgcatcagcactcccaatatgacagaggcatagagaatttgcccagctacatagcttagttctagttacactatatctaaca

SEQ ID NO: 70942 - DNA, 515 bp, Homo sapiens
ttcttctagaagaaggtattcatcagatcagcgtatctacagagtaaaactagagttttgcctgtggaatggcaccctgggaaaaggtagagcctaagaatctccacctagaagcaaagcatgataaaaatgcacagccacacaggtttatctactcaagggattcttctttgctaacaagactttggactattggactaaatggtgctgttttaagcccttccgggaagcctgggtgtgtgtgtgtgtgtgtgtgtgtgtgtgtgtgtgtgtgtgtttgtgtatgttttaggggtgggaggtagggaagatgagatctgggaataggaacaatcccttagactatcaccaattcatcttgtcaaagaacaaaggtatttcttacaacacacttcccagcctcagtcttctttcccccacatttacataatctctttcactttccagtgtaattcaaaaagggagtcaggataggtaagaataacagctacaaaacattgcttttcagggattgc

SEQ ID NO: 70943 - DNA, 1141 bp, Homo sapiens
atggagtagaaaagatacctaaatacctggaactgcaccacaacccaatcaaaaaaaggcttgtctcctggggctgcagagaaaaaatcccgcagggcccgggtgcttcccatctccagcaacctaaacgcctctaagtcgtcctgggatctcacatcctcgcgcccgcccacccctccccctcttctcaccctccccccgcttcttccccacgcagtttctaggcccaaagattagcaaaaatgaccgggataccaaagaccgcctccgacttcgaggtctcaatcccacaggcaccaaagaataaacagaggagcccgaccaagcgtcaccgtttaggggagattgcaagaagcgccccataccctaggccgcgccccccccacctccccccaccccatccccacccccacccccgtcggagccttgcgccgataccccgaaacccttctcacctaaagagaaaacgatgcctctttcggctaagcaacacacaggcctaacccaccaagcgaacgccttcccaaacacccgactcagacggtgcctgggcccagaccgctggggcccatgagacggggttgcgttttacctcatgggctcagcggtcatgttttcgcttgaacgccttgtcggcttctgtgattgctgggcgccgatctgcgctcccccgcgcccggttacgatagaaatgcactggagtcttagtcgtcactgtagctgctgctggaacctccccacagctcaaaggccgctaccactgccaccgccgcaggagccgcggaaacaaagcgacaccgctgccgccgccattttgttgggccgaggctcaggcaggagaattggcgcgtcctccctctttctctttccgtcagccattggctacctcctccaaagcacagagtcttattggctacggaaattcaccttctttgggggcctgttgctaaggcggtcgacgtcatttgatcccctccaccttttcgcagggggtccaatttagtcccaattgacctgaaagtgctagtgacatagtttgactttattttgaaaatgctcttttggtccaacctcttttttctttgacatattaacgaagtaataacagcaacctacatttattgagagtttactatatgct

SEQ ID NO: 70944 - DNA, 1358 bp, Homo sapiens
ccaatagctttccaaagttattttatcacgtatttatctacatattacagaagtttttactgttcttgcaacttttctctaaacttgacgttatttgaaaactaaaagctaagccaattagtatagtagtaatagcagacaaaaaaaatgagagaagtaaaggaagttttgggggaacagaaagaagaaagagctagtgtggagatactaaaccgaagcttgtggaacttgaacgccattttgaagctagttccttagacgattcggtcgaagatctgtctctcggctgccctctatagagctctaaacctggcttcaaggagttctttcattcttcattagataccacccaccatacgtcattttataaagccggaaactacatttcccaaaaggcctttatttttcctcgcgggaaaagggattgcaattactataggttttacaggtatcgcgagatttcgtcaaatctcattacggatcccggctgaaagccattttgtttttcagctcacttcaagggtacctgaagcgaattggcaccaaagcagcagctgtattgccgcagttctagcttcaccttcacgatgtttcccttggtcaaaagcgcactaaatcgtctccaaggtgagcaaaaattatgacaaatcatttacaacaaccttatatcaatgtgtcctcgcggcctctcgtgtgctttccttttacgaacatctcggccttctaatcttgaatgctgtctgtctcccatctcgtcccaagtcattgggatgatgtccttagcattggctttatcacccagtatttctgtttcggtttccagctctctttctgttatcggagtgatagtctagccctgctttttaattcttcagtaacctttgatttcagggaaggacattcttggtagacacctcgttccttaagtgatgtcctacattttagctttggggatatgtttactcctaaccctgtatagaaaaatatcttctccaattcctattactgtaatagacggaaactgtaaatctagctcttcacctggtttaattgcagggaaacaacccaaatggtatcgatgcagctttgaagttatttgtggattaacaatgttagctggccaggcgcggtggctcacacttgtaatcccagcactttgggaggccaaggcgggcggatcccctgaggtcaggagttcgagaccagcctggccaacatagtgaaacgccgtccctactaaaaatacaaaaattagccgggcgtggtggtgggcgcctgtaatcccagctacttgggaggctgaggcaagagaatcgcttgtacccgggaggcggaggttgcagtgagccaagactgct

SEQ ID NO: 70945 - DNA, 1389 bp, Homo sapiens
gttaacacagtctaactgatgcacgtgaatttcatgctgggcgaagatgaactatgtggaagatgacttataaggagcttttatgttacatcttggcagttaacacagtctaacagatgcacgtgaatttcatgctaggcaaagatgaactatgtggaagatgacttataaggatcttttatgttacatcttggcctgaggttaggaaactaaagatgacaaaggcactgttttagtatgggttttctggtttcgcttttgtcgtgggggcggggtgggatagtggactcgtaccctaacaaagacccactcgaggctgcgtgtcggcccgggggcagcagggggcaggagaagctggctctagaccacgcgttccttttcacgtgaccagtcgctctctttcccgtggcggccctgcttccggcaggggcatcacccggaagtgggggtagtcgagggagggaggggtaaaggcggctggccgccgcggcggggggtgggaaaagagaagcagagggaggagttgttgctgccgccgccgcagccgcagctactgtgacttctccgattgtgtgagctttgttggagcctgcgtacgtggatttatcgctgccacggtctgcgtagctccagaggtttaaccataggatagagaaaccaggtaagtcctacattggcttcccgtcgtcctttctcctggagggggtcttctgtgctgtcagtttgtactacgagtgtggtgagaaggtcatgttagtctggggcagtctcgaaagtttcacttattcacaattcaggtattaactacatttatgttttacctcccctaacaggggatagaggaggggaaattaaatcctgacctgtgtcactttcttgtaccctcttggagagaatgtcctgatcatccatggcctacgttacccaattaattgagggtacaagaaagtttgtgtttggcattgaaagtcacatggactggggtctttgcttagtgacacctctttatactttggaagctaaggttactaaaatgaccataattgatgaaataataattgaaaaatagatatttggcttcttgtcttgctctgggagcgtaaggtaaactgagagaactcttgtttccacttagttttgttcattgtgccccctttccagtaaagttactgtccattgtccgaccctgtggcatcttatctttgacacttttcttcgttgtagacgttgagattatcttaagcacaaacacttatcgtttcacaattcagcgtttgtccaggatctgatctttattttaatcacagactctttatctacaatagtatggctttgtattgagaatatgtgcagaacattgaattagatgatactgaggttattaatttt

SEQ ID NO: 70946 - DNA, 1800 bp, Homo sapiens
attttttattttaaaaaaggtgggggccagagtggacctgggcctcttccaacttctgagaggtctctattactaagtaagccttaagaagcagaattccatgaagggagctaggaaaccaggattttccaaaaggaggtggcatttgcattgatcctggtagggcagcctcgaattccacggggttggggttgcgccttttccaaggcagccctgggtttgcgcagggacgcggctgctctgggcgtggttccgggaaacgcagcggcgccgaccctgggtctcgcacattcttcacgtccgttcgcagcgtcacccggatcttcgccgctacccttgtgggccccccggcgacgcttcctgctccgcccctaagtcgggaaggttccttgcggttcgcggcgtgccggacgtgacaaacggaagccgcacgtctcactagtaccctcgcagacggacagcgccagggagcaatggcagcgcgccgaccgcgatgggctgtggccaatagcggctgctcagcagggcgcgccgagagcagcggccgggaaggggcggtgcgggaggcggggtgtggggcggtagtgtgggccctgttcctgcccgcgcggtgttccgcattctgcaagcctccggagcgcacgtcggcagtcggctccctcgttgaccgaatcaccgacctctctccccagctgtatttccaaaatgtcgctttctaacaagctgacgctggacaagctggacgttaaagggaagcgggtcgttatgaggtaattctgcacgtttgcccgcgtgctctctgtgctctgtcgcaaacctctttggccggagccgacttgttctctcgtctgctctaagttcttttagcttttggctgggccccaggggtcctaggcttggagggcgaggctgctcacgggtttggtggtttctagccgcattttccccagcccagaaagcacccgaagtcacccttcggggatggatcccactgaggaagggctgagattgccgctgggacccattttgtcctttttcctattggtgaaatgcagttccgttgcctccagctcccagtcggcgagatgggacttaatgcttatcctgcaaatctctaggcttcaaggaagggaccttgaaaggtcattttactttcccttcccccacgctcctagaccgtcgcagccaaatgagaaacggcccacatctcacaggttcctgcacaaaaggatatttttccaagaggatgttgatttaacttcaggagtagacccccccgccccccgccactaaagaattggggtgggagggtagggcggggcgaactggaggaggccctgcagagcttacgtaacaggcgtctgctgccctgcagcgcggtatcgttggactcttgggcacaggatttgcatcaggattgtgacatactaggtaatggtagagcagggtgtggctgctcatacttgctggcctccaatctcatccccacgtgtggctagaaaagtagaattttaaaattgggggaagtttcctcgtgcactttgggtctcttactctgcgcatgtggatctctagtcacttgccaacacggtttctctcttatctgccagaattgttggtagagtgggcagcttttacatttatcctttttgtcacgtgtgatatatttgtgcataccaggagcaaggtgcaggaggatgagtcggtatgtaactgatggacttgactgttcatataccttaacaggatccaagagtggtgtttttgaggggtcataaaggtttctgttgatagcatttt

SEQ ID NO: 70947 - DNA, 1948 bp, Homo sapiens
ccattactagattgtgaaatcattgatggtaggaatattgtcctgcatatgtttatgtgtacttcagtgccttgcttacagtaagccctcaaaataaatacttgatgaaagttgagcttaatttacttttaatatttcgcttttgatggtttgaactcaacttcatcaaatctaagaagataaaaagaataggcacactttatcgcttacttttttatcattttcgatattctcataaaattattaaaatacaaagtaatcatgtttctttcctactctgagtttgtgagatggggaaagagaaaggggccaaccttcaatttttatgttataaagtcctgatacatatgaatttgttggaataagtatgcagtatttcatagcagaagagaaaaatacaatcatatctacaacagaaaaaaagaaagaaaaacaaatatcttagtctaaatcactcacaggataaagtttaaactccttagctattaatagataatgtctttaacctaaagcttcatctccccacctccaccctacacacacacacacacacacacacacacacacacatctttactctccagtgacatagaactatcatttctgaagacaccttgctttttccctccagcttgattttttgtttgcaccatactaaacctaggaagccctgcctttcctcttgcttccaatgaggtttctccaggaaccagctcaaaatgcaccacttcagttcaagcagaattagtgttctctcctttgtatgtcacagtgctgcactacccaacggcttccccttttaaattgtggtcagagcaaaaacaatgagtcatgctttagttatatttttccttttctgtctctctcttttccctcctcttctctcctgcctgtctctgatgcatagaaggcattccataaatgcttgttgagtgagtaaagtaatgattaatttaataaattaaaatcttttctagggtactagcactcatgtttagtgaatcaatattattaaggtggttaatagagtaaaggtcgttcatactgaggagcagtgtggtacgttggatgacactccagctttggaatgagacagatcagagtttgtttttagaatccatcaattcctagcagtgtgacctctggcaagtaacctcacttcagtggacttcaatcatttgatttgtgtaatggggctaacaatatttactttgcagacagttgaaaagacctaaatggcccaacacaatatctggcaaagagcaagtgctcactaaatggaaatttttattagtctcattagctggtatgtttcagtttagtatatttgttgccatcacataacttagcatttggctatctatgctagctgtgtaacgcctgctaatttttttgttcttgaccacatttaaacctctcatgttatactttaaatactgtccacagtacctgactgaatggtagccacagacttgatttttaactcttgggttagaattgtggatcacggtgaaaagagagcaaaggatttaaaaacaataggtagaggtacactgagctttgttaagtgactttcctttctctggtcctcagctcattaatctgtaaaattaagacgagagcttattgagtctttttcaacatacagcatctgtgattctgtgattagataattattcccgtttgtaaaataaagaattgtactctaattaaataagcctctgtagccagatagaaaaatatagagtccaggtaggttgaccaaccgtctcagtttgtctagcactgtcccagttttggtgcagaaagccctatgtcccatgactcctctcagtcccagggaaaccaagcacagttgatcttcctaggtccagggtaatttggccaataagaggcattttttctttatggttgcttaaagttttttttttctctctttaattccaca

SEQ ID NO: 70948 - DNA, 512 bp, Homo sapiens
ctagaggtcttagttccaaaaggaggaatgcttccaccaggagacacaacaataattctattaaactgaaagttaagactgttgcccagccaatcacttaaagcaagtatccaatgcctctgagtcaacaggcaaagaaggcagttaccatattgattgacactgactactgagaggaaacaggactgctactccacaatagaggtaagaaagagaatgtctgaaatacaagagctcctttagagcatctcatagtattaccatgccctgtgattaaggtcaatacaaggctggtgattaacaacaatacaatccaggcagaactactaatggcccagacatttcaggaatgaaggtttgggtcactttactttactttactattctgggtagtaaaagagggtagttatacataccaactacaaccatgtgaccagttatagaactgagtactgtaagtgttatgaaatattattcctccttattttgtaatgaggtgtctgtgtgtgtat

SEQ ID NO: 70949 - DNA, 1093 bp, Homo sapiens
ggaacctcccccgcaaaataaaaaggatcacctgtttttgtgtgtcaatgctgaacacaaggtacatttatactatgaattatatttgcaggagaaacaacatagaccaatgcctttggtccttcactaaagtatattccatttttaaatatgtccattgttgtctccttgtaaacccaaaatcgtgtttcaccaattctcaaaaagtgataactcagtttctatttagtgaaaacgggtctatgcaaatgcgacttaactgataattgaatgagcttataaaatcggagatacgtaacgattatgcttttactcagtagaccattacctaaccggcaaaatttgaaattggcttgacgctccttattatttttaattatgtcgtttttcctaatccctggtccgtcaattcccctccagagccccttcctcccacgcctcccccctgcccccccgccccccccaaaaaagaccaagcctggccttagttcccgtatttcaggccaggaccaaccagaaaccagttttcttccactaatccggaactccgggctgttaccaacgctgtcattggccagcgtcagaccttagtacgtgccccaagataaccccttggtttctctcccttttccgcctacaatgggccttccccaatgtttgtaacatattcataatccacaacacggcacctctgataatcaactcacattcttcaaagttttcgggtggaaacaagcagggccaaggggagggcaaggtaccctttttccgactagcagggatgggggaaggggcagtcgttctttggctctgcaccgagctctagaacctcgtcggctgagaggtggggggcgggttgggggtacaaggtggggagggagtggtgaaagagttaggttaagttgaaatgaaaactttactcaccagatcctcgaagcttcttcggtgctctttcccctcccaatctaagcggcgcggaatcagctgggggccggacgaaaagaaagggggaagcggaggcaaatgatgaaggaaaagcctccgctccccatcaactggacccaacctgtgtcccagtcctcaacactttacc

SEQ ID NO: 70950 - DNA, 1860 bp, Homo sapiens
gctcgggccatcaacccattcctccctccacacttaaagcccagccgctgaccgtttgactagtcaaggccggcctttccctcaccctcaacggaactgctcgtcccgctgcctcgatttccccactgggaccattcaccacgactcccagatctctttcttccccttacctgagcggatttgttgcagggtccagactgcaagaacctagcgatcaggtaatacagctctggggaagaggggggaaaagaggttcagagggaggtagagaagagaaatagaagctttttcaaaagaaactgacagccttcgcgctaagcccccattcccttagcacccccccaccccccgacacagctacccaccggcttcgatctgggtaggtgctgccgccatccttttcccgagggggtttgggggcttcgctccggaggggctggcgggggcgggtgggggcgctgcctctattgtggtgaagcccccatgcccgggagtcccgccgcttccgccgcactcctcgtcctagtttcgctctctctcgaattcatcgcatcacgtttcgacccatagatattctagcccaagagctgaggaggcggaggaggaaggagaggagagggagagggagagagagagtgagtgagtgagagagagagagagaagagagagagagagagaggaaaaagagagagagagagagagagagagagagagagagagagagagagacgcggggggtgggggggcggagagagagagagagagagagatagacggagcgagaagagggaggagccgaagtggcgaagaggtgggcgggggcaaagggggtggagagaggggagggtaaaaatggtgatagggttttgcagcgctcatagttccccgctagaggcactaatacagcagctgagcctagactctcccggagcccgatggttgcttagctacagctctgggaaggagggggaggtgctaactgacggccgacgctctggcagccgccttggaactctgtggtggcattcgcgtctgcgagctccggagtgactttcccttcctgtgaaggcaatccggccctttccggtggaggacccttccccctgggttgatcttgaggaacttaagagacggtgttttgactcgactcctttcccctttttcctcccggtaccaaagcggttttgtttgctgtttatactctaccccgtggaaaggcggctagctggctaaagggttttatgcctgggggaggatgagtcgctatttggtcgtgacttgtttctgtttaaaattattattatttaccaaatgaaaatgttgtacttaccagtccaaagtgcggggcttatattgttagaagaccacttaaaatgctcctggattctgacaaatattgcatgagaaatttgcaatcagccgtgaagcatgtttccccttctgaaagtttaacacgtgccgtatctacggctgggatctaacacatcccattcctacagggtaatttcctattgtgttttcaaatactactaaagtactttaaccaagagttttcaataatctttatgtattattgcctatctctatgcaaggtatcaatagttttctacaggttcgggactacactgtttaatatataaccccaacccttggtaccgcactgaccttcagtatttggttgctgaaatcttcaatgatgaaaggggttggtatgataattgacacagattagtaaaccgggtccttttcttccctactttcccgtaacatcctgtccccaccccactccctcacctaaacctgatgagaccagaaatgcattttaagttgcatgtattatttacattgaaatattacaat

SEQ ID NO: 70951 - DNA, 1573 bp, Homo sapiens
cttataatcttcccatctttagctaaagagcttggaaaggtccagctttctcacccctaaagtttctaattacagcggtgaatctctgttctctaggacagtttgaagtctgcgccgcctaatggcacaggattaccattgcatagccatctggcctgacaagaagtggaggaggagggaaggaaaaaaaaaaaagaaaaaagaaaacgggaagaacaaaggcaaatacaggagaaagccatggctttcgttccccagacgggacggttccccgagaaaagccggtggcagaggaggaaactgaagtatggttgggagaagtgttctccaatagggtaagcggaggaagggggttggggtaggaagcgacagcccagcgctatggctgtttgtaattcagcatggagacacctttcaagagattctctccttaaacagaacactccaaaagtgaactaccagttgcatgcaagaccatcctaaaccttacaccgactgctctttgcccttctacccctttccgtttcattacatcacaaaatggaagaagccaaaaagctttaaaaaaaaccaaacaaacaaataaattcttcctattaggaaataggtaactcagcagctcattccccgtctgtctttccatttcacttacctttcttttgggcattgttgtagctctctataggagatcttagtcagcagaaaaaaagccgaaggcagtcactgcctgactgctccaagagcaaatgagttttcaatgaactaactgcagcacgacctgtactctcctctggaaaaaaaaaaaatccctcgttattggcaacattaaacacgccaagacgcaaccaaactacgtgaatggttaaccggagtgggagccacattggagtgacaggctctcaggccaataagaagaggcagccggctttgaggggcgtggcccgcgaacttgcccgaagccctcgttccctgtcggctctaaccgctggtgtagtggcggagcacgcgaacttagcaagggctaagcgatcaggaataagaacagcaggaaagccagagctgacttgatcagtttttttttcttttatgttataatgacaggcgaaagccacaacagttgctttcttcacagcctccaaacccgccacccttccctattcctagcgggataagtgcttttaagaccagttgagtctgggctccggtctttccctgccacctttggcgggatggtgttgaaccgacaagaacattcattcagaaagcgcaaaagagtggagatgtttctctggtgtgggaacatcctgccaaagcagaactgtggtgctggcaagaggagggtgccaaaatggcgtgttttccgcaggtgtagagtagcgacaaaaccgggagctataccgttatcccacttggaggaggtatacgaagaattcagcgggactccgagggaaatgtgtaatagcagaggtctatccaaatgaaaaacactgagaatagatttttaatctgaaggttgcatttagtgaaaggactcaagaaggtgctatccacgaaagtgtttaggactcagaac

SEQ ID NO: 70952 - DNA, 1041 bp, Homo sapiens
taatttaacaaaacacaaaattcaaaaagaaaaccaatcctgccatttctgggcttaaggaaacctgaaactttccttcaaaactctgcagcattgctcagtactttagtgcctaattcctacaacgagctaagatcagaaaaatcactacgtaataggaatcttaaaatgcgcaaggctttgagaacatgggttttcaacatacagcttgctctttcaggatctgtcttcttatttgcatatatttctgagcaggaagttatgcgcagtacttttagtctccgcgtgaaaaggtccttcatgctaatctaattcaattcagttctcctttttctttcttcttctcctcgccctcttctcagggaaggaatcgtcaaaaatcaatgtttcaacagatctcgcggtgctattcgagattccctattaaaaaaaaatagaattgatgcaaacagcctgttccttccggggttttgggctggaactgcagcgcttagagagctcggtggaagctgctaaaggcggaggcggggctctggcgagttctccttccaccttcccccacccttctctgccaaccgctgtttcagcccctagctggattccagccattgctgcagctgctccacagcccttttcaggacccaaacaaccgcagccgctgttcccaggatggtgatccgtgtatatattgcatcttcctctggctctacagcggtaaggagagtggggagtccacctttgttgttttcctacacaccagtcctctgctgccccagaaccattaaaatgcagaagttcctctggcagcttctcctttggaagactcatgcatccccgatcccacccttcttcttcccttttttccctttgttgcatcgatttcatttttttttttttccacatagagttcagctttgtttgcttcgtgacgttggggggcacatttctgctttgaaggaaaacgaaagctaccaagttttgggagatgggagatggtgctatacggtctttagggttacgtgaagtcaagtaaaatcgcac

SEQ ID NO: 70953 - DNA, 1095 bp, Homo sapiens
gtaggtttgttcttttacatgttttattttattgcttgaacactgtcatttttatttaatttgtatttgaaactagctaatagaattcggctgtattttacaagtaattttccccgaggttctttaatctcttttatagaatttgctagtttctttgtaaaaatggctctttcattcaggagctttgattgaaaacaatctttacagaagcccattagaatttagtggtataaaggattaggtcccttttataggcctgaagtggctgtaagaattgtttgtatctatttcaactgtggcttgcccacactatctgaagaggattttgcaatttggtttggttgatcaaaaattccttggtgttctaattgttaattgtcaaagttcacagtcagtgctgataaggatgtaaacatgactaggctttcatagctctgccacttcatgggaagggaattttatcattactagtagacaaacaaaggctgaatctgagagcaagtaggacagaatgggcaagggtgttaggggagtaatgatggaagcctaacctcccaaccccatagtttcacagacgtgatttgtcatagacaggggagatttgaaaacatgtgcatttgtgcttattaaaatgaacaaaaaatattggaaatatatttaccaaaatgttaacaggggttatgtctgcataatgaggtttggataatttttgttttgttcttattgttttcctgaatattttatacattctatgtaaagcatgaattatttttagaataggatacaaataaataataccaaattttaaatggaaaatgatatataagactagcttttctgcccatttttgtaggcctcagaatgaggaggcttactctcaattgtaggttatataggaactttagatgacatctttgcagttgatattttcttcctgaattaaataatgatatagacttcctgccttttactatcaccataattcaaaaggaatttaaatgtgcagtgaaaattgtttgattgtataatgatctgcttggcagcctattcacacagccccgtaaccttcctagctagagccacataactatcaac

SEQ ID NO: 70954 - DNA, 656 bp, Homo sapiens
tcactgagttgacatgtaagactagaaaacacctacagaatatgtcaaaaatcgttgttaagggcatgtattcagacagttttcaggggaactcaattttagcatctctctcctttctgtggttatttgtccctgggggaaagttaggaggtattctcatttgatctcgtgattactcagagggtgattcatttggcagagaattagaactaacaggtctattcctcatgtttaaaatctgttttcttatgtggaaagcaaattcttcaaggttgactcacaagggagctagcttgaggcaatctgtggccttatagcaccacacagcactaaacagcttaactctggtttgagtgcaaacaagaacacatttttctctatgcaaatattccattaggacacagactgtattgacctcagttgtttagattacaggtgaaagccaaacaccagagctaatcttgtgaatcagcatgaaaggctctaagtgtaattctcacagtagttgggaagtctcctgctccacaacacctccctcattaacctctcataggaaccaaagttgcaccataacacatttattcctttcaaatataaaggtttgcagactttcagagtttccaataaaattagttttgagaaaaagggagaaacag

SEQ ID NO: 70955 - DNA, 1038 bp, Homo sapiens
gccagtttaaactaaatggcagatctctccccatcaactggtgcttgaaacatcacaaggcctgggatgttccctgggtctctactttccaaattcagcacagaaatggctcagccccacctcttccagtgaaaccgaaacagcgcctgtgcaaactccacgcctattctcctcacagtgacccaccccgcccccaccaaggtgctaatgcgcaggcgctacgctctcagtgcctttgagtagggctgtgagaaatctactgtccagtgaaatctagaagtggtagaattcaatcccctcctttcttcggaggcagaggcgccacttcctcctactacccgtccagaagcgcgtcccaaacatcgctctctctccgagcaaggtccttcgctctctggcaatccccattgtatccctatccgcagctcgtttctaatctcactcagccgccagccttcgctaggaggatagaggcacttggctccctaggatccgcaccagttttttgtctgcctgtttaggccacggaacctatggacccccccacccccaacctcgccccaaactaggaaaagcattatcccggtgctttgccctccctccttcgcccttctcacccacttagtgttgagtgcttacctcgggtgtggtgcggttacgaaaggaatcagcggaacccagatcaggccgctgctggggcaggcggattcagcgagatttttcctgggtctccagtgccgcttcagacaatgaaatcagcgtgtccgatcatcaattctcatcatgatcgtgacgtcacaaaagacagcggccaatgggagcctgcgatcagctcaggacagtccctggcctcagcccagaacccaagagttgggaggggggaagagagatggctgcctgcaactggactgcctcttcctcacacaaatcagctacatctacggccagggctctctataccttcctgaatagctgtgaacaccgagcatccctgtgactatagtagttacatgccagccatttgagcaggtgctgcct

SEQ ID NO: 70956 - DNA, 703 bp, Homo sapiens
gtttttaagatgtttatcccttccttcatttcctggtttgctttagatttttctttgtgcttattttcaaccttgttttcgatcacattgaacttccttgcaaattgtgctatgaattctttaagcgtcacttttgagtttctattttggttagacaccattgctggagggctagtgcgatcctttggtggcttcactatcttcagatttctcatggtgccagattttttatgctggttccttctcatttggagatgctgacacttcttatttttgtaactattttcgtgtgggtgaatttttttctttttctttcctttcctataattttatttttttctttcctttcccctttctacctgtctctagcaggtgcgaccgtagagaatactgggtagtcttttggctttgtctctatagtcctatgcactttattttaggctgtgcagtttaacctacgagccagtagatggcactcatgggtaagagctagctgtggcctacatggcgggctgtatacttgatctttgtttactggcagatgctctctgttgccttgggcattgagcttatttagggaatatacagaggtcttagcttcctgctcagccccagggggtttgtggccacaaggagtggggccagactaggcagatctgcctacaggtcccccagtggccgacacaagaacctcttctgaagg

SEQ ID NO: 70957 - DNA, 1064 bp, Homo sapiens
tgataatgttctggaaggctttatctgggaccgggagggtcaaccacaggggtgaacagtttctccagaagacagctgaccgaaaccgcagcagttgccaaggcggctggaggagggcggagaaaaggcggtaactggcaggcaaggggcgtaacggggtggggctgtcctaagggaagcctagtcgaactgatttgtccctctctgctctccgtctgaaaaccttggccgaaagggttgtagacatggcggccatcagggtaagcgaaaaccaacttgcttaatttctgtgggtgccgatagcatcccggtaactgtaaaagggatcctactaacttctgaaggagccctgaaacaaggggcagggtggaggtgggttttgagataattgcaatctttatcgtttgaagcctcaagacacctgcctttccccattagggttttatcagcctgggacgctgctccctcaatcccctgtggttgtcgatttacacagtggcacagtacaaaactgggaaacggctgggtgaaaatggctggccaggcgacgagccgcagtagacgtttcggtcttcagctgcaataaagagaaaaatatatatataaacttggcatttgtctcggcgcacagggcaaggccacatgaccctatggaaggactttgttgaaacatttggggtgaaactgaccaggatagagaggtcccatagtctttcagcagtgcgctggtttacacatagtgttgttgctttctgtgctcgaataacctgttcctttcgagttttacgcttgggaaaggtgcctttacttgggagtccgtgtacagtgagtgactcagctggcagcttgctgcagttccctaagtagtgtttaataatggtagtctacagatatttacgtagcgggttttaattgtaaaatattctgttaggcttgcaggagatacagtatgaataattcagttccgctgaagttttaagtcggcagcgtctacagttctggttctcatacttcatctgagttatttgaacaacctcctacctgaacttgccacctcaagcctg

SEQ ID NO: 70958 - DNA, 472 bp, Homo sapiens
taacaaagactacaagtttgaaaattctttaaagtcttatgttttgtcttaaacttgttcactggcaattttcaattgtaaatgataatatatatttgttttgaattagaaataatgtttcaatttatataccatcaagttaaaaattgtgcctcagaaatatacaccatgtttgtcctgtcctttgacacacttagcacatcttggaaaaccccagtgtgagtattaccaaaagataaagtccaaacttcacagtctggccttcagaccttcattatctggcccctgcttgtctatccatttcctgacattttgctccgggagcactgacttaggtgtagttccatcaccacaccatgctatttctgaactatcggctaagaaactctccatctggttcttttcacaccccttctgttcaaccacctggataattctaactcttcatttatgttcctgtgcacatgtctca

SEQ ID NO: 70959 - DNA, 1568 bp, Homo sapiens
aaagagtcatgacatctccctggtgacaaataatagaataggctagaaaatatactggacttactccctacacaaattctcatttactgtaagttccacatacttgctacacaagaaagctgagctcctttcaccatctcctcattccaagaccaaggaaagtgggcctctatgacaaggtatgcagaagcaattctaatgtcagagaggaagaccaggatcttatttgcttttattaattgacaagcaaaaagtgtatatatatttctcacgtacaacatgttgttttgaaatgttacttggttttaagagagccctatgaatctacaagaagttgctttggcaatcagatcagcctgccagaaagaaataccagatcgtgttcgcagtcattagggctggagagagattttcctgtgtttgagttattactcattccacattagtccacccattcaaatccgtttatagacaaccaaggcaggtagatgaacaaataatacacaaaggttgccctcaatttttgtttccctctgtgatctcatctgttttcactgattcaattatcacttctctgttgatgactcactaattggtatctccaatctgggcccctctggtgagctccagactcaaatctacttctagttggttgaaaacacagatcatgactcatgagcttattggacacctcctttcactaaaagtcccagatgtactttaatctctacatgtccaaaagacaaatttattatctgtcccacacccccaatttggtcatccattcagtttccctatctcaataaatggcaacaccatccttacagcctcctatcctgagaaaaaaaaaatcttaaactcattcatcattccttcctcacatatccattctagttaatttcttaagccccttctatccttgctatccctaccactgctgcattatttcaggccctcactccctcttatctatctattgcattagtcttatcaaaggtttccctgcctgtagtttcttccccttccaattcaatcttcacactactgccattgtgatcaggtgttggcaaacagtattatgccattcctggcttaaagatgtttaatggctcactaatgtttctatagtagagtccaaaattcttagcattgctataagacccttcaaaacttagtgccaacctaactccccagtcttatctctggacattgcctttctctgccatgcatcagccacaactgcacactcaacattgtttgagtgagccaagggcctgcatatctctctgcttttattagtgctattgcctatgccccaaatgctattccaccataaaactaatgatggaactagtaaaaaaagacagaactactcaaattcagtatcatctcttctgtgaagccttcaactcttcaaaaagaaccgatccctgtgcttccacagctttgcacatacttccattagagttttgtcatgctgtcttataatcagattacatgaatgcttcctgtgactagactgagagcaacttaagggcaaggacagtagcttagtcatctctgaatcc

SEQ ID NO: 70960 - DNA, 801 bp, Homo sapiens
agaagcagttggacattagagactacagctggacatcagagagaagtggctcgacttcagagggacaccttgacagcgtaacttcgaagaagaatctggccagagacagctggcattcaggggaagactaccttcctgccctttgcagctccccttcccactaagagccatctccatcagcaataagatcccctacatttaccatccttcaattcattcatgtgacctcatttctcctggatgccggacaagagctcgggaacgatgagtgtggacacaaaaaggctgtcacacttgccctttgccctcactggtagaaggcagccgattaacacaaaaaggcagagggcccactgagctgttaacccttaagccgtctgcggacagcagagctaaaagagcactgtaacattccctctggagcttcaggggttgcaggcaccacccccggagatgctaccacagggccagcacagagttgactcctgccagtgcccaaaagcactcgccccggctcctgcacccactcaactgcacatcccctcttgtgaggggtgaaacacagcaggtccgagtgagtggagttcattcctcctggcacaagagcggcaggctgactccagcactcatgtattccagttcctgccttgttcactcacgtgctccctcctatgaggagttgaaagcggtgggctgagtaaacagggtgctcccttcacaagtcccatgaaggggtcaggaaaatatcctgcttcaccagtactttttaaaatgtgataaaaaccaaatcagtcaaggaat

SEQ ID NO: 70961 - DNA, 1201 bp, Homo sapiens
atcagaatgatcaattggcaaatgaactcattttcttagaaacagcttagctgagttctgcttacagaactgcttttcacatctaatttaagcttaattagaccaatttgccaaatgttagaaaaagttaaggtataattcaaataaatgttatagcattatttattttcatgaatagctttataatgaatctatatttttaccaatcaataattcagtatatttgctgccatcaataagtttggacttataaagtttctgataaactttggctactcagagaaagtttactcagattctagaacaccatggctgttcttatacaaatcatgtatcataattaattatgttaatcagcactgcaaagtagaaatacattctcaaaatatgttttataaaaataaccttaaagactgtacagtgatgattttgaataagggtaaagtgtcccttcacaaggtcaaaattcatctcagttgacaaatatttactgatgactactgcatgccagcattgtgtgggttgatggaatgaaacagcaaataaaaagcctaacctactatctcatggagtttacagtgtcattggaaaagtagacctaaaacaagtaaataggtaaaataattacacattgtgataagtgctaggaaggaaacatcattttaatgagcaattcagggttggaagttgacaccaagttctccacataggcagtaaactaggaagtaagccagtttactactgtctcagtgtgatatcaaaccatcaaacacaaagttagctaaaagctgataaagcagtaattgtgtccaacgttttaagggctgcagagtatatctaccataaatgttttgtttggcttctgaagcatttctttagtgttttctgtgagtcattctgaacacacaatagcaggacatgatcatcgactggaagacatgaaatataaatagtgtaatggtgctgaaaaatcccttaccggaggctggctagaacccctatgcagatcaaagcacacaattcaaaggtcacccatgatgtctagccaaacctacaaacatgaatagcaagactgaaagataaaaaatttccaacagaaacattgtagacaaagatgacatagcattaagtgatctaaaatttatgaaggttttgaggaattttaacgtttaaagctttatacgacagaaatgatttcaag

SEQ ID NO: 70962 - DNA, 997 bp, Homo sapiens
tgctcccaatttaaagaatccagtgttctgctattgtccattgagagctctcattctatttttttagaataaaggctgcctttattcgtgaatcacaaacaaaagccaattagatctataactacatttgctgtaattttgtttttcaactttggtaccagtatttctttcctatctgcccttccggtttatcctagaaaaatatagtttgtattccctagacagtataaatacagcaaaactaaagccatttaaaatccctttacaatttcaagggcttctttacacttctgtcagataaagacaaacaggtacttagataggaggacacttcagttaaaaagaaagactattccaatgggagactgctccagatctcaaaaactctgtgaacatttcaaaatcaagcagaaaagtgattttccttaatagggtaaaaaggagacaagcagagataagcacgaccattagaggagaagttggacaaacaagggaaaataaccaatgcgttctgacaaaaactgtcctgctatgctcaggaaaaccagggaaagaggttacattccactgtgtttgtttgtttttgtgcttgttccggcttgcaagttagcagagttcagggtcctaaagatgaaagagaagcctaatcaaaggttggtgacaaagcacagggtaaaaagcaggcaattgtaaatacttggtcactttgaaggaaacggtcaattaaattacatttagcagtctacaatttgtaaaccacagtccttaagaaaagtggtcttgaaacatcagaaactcagcttagatttactgttttattattgattgaccaatgcaattgacttaaataataatatttaattaatgttttatactatttaattatcatcatctatacacattcacacagagtatgataaaatgcaaagtaaaatatatttgctggtagaaataattatgagatttaacaaaggtgtgatcctatttggttaactcc

SEQ ID NO: 70963 - DNA, 2226 bp, Homo sapiens
gcgctattctttttgtgtagaattgctttagctattcaggctattttttgttgttgttgttccatatgaattttgaaatagtttttactaattctctgaagaatgtcattgatagtttgataggaatcactttaaatctctaaattgctttgggtagtatgcccatcctaacaatattgattcttccttaaatgcttttccatttgattgtgttatctctgatttctttgagcagcgttttgtaattcttttggtagagatctttcacctccatggttagcagtacttttaggtattttattctttttatggccatcgtgaatgggattgcattcttgatttggctctcagcttagatgttgttggggtataggagtcttactgatttttgcatattgtttggtatgatgaaactttgttcaagttgtttatcagatcaagtaggttttgggcagagactatgggatttctatgtatagaattacatgctctgaaaacaggaatagtttgacttcctctattcctttttggatgccttttattttatttcaattgcctgatcgctctggccaggacttccagtactctgttgaataaaagtggtgagagagggcatccttatcttctggaattccaggggaatgactccagcttttgctcattcagtacaatgttgactatgggtttgtcatagacagctcttattattttgaagcatatttgtgcaatgtcttgtttgttgagggttttaaaaaatgtctatagtttgtagagttagagatctaccttctactatcttgccacatggttaacatgatagaaactttaataaaggtggttgtggccaaaaatacagggctttatttcctccagcctccagttatgtgttatgctactttcccaggatagggtgcttgcatttctcatcactcccaagctgtgttgcaggagctaaattccaggaaggcatggccaaagggtcatcagctgtggcaggtaaatacaagacatgtgattattctcattccagcttgcttgcttgtagatgaaatgtcaacaagtacgccaggaaggccagagcttgtgatatatgcaggaggaagttaagggggcaggtccccagagaacctctgaccagcctgcacacttggaggaaggagtggagccatgggaagttcacgctgtttgcagccgggagaagcctggcctattcagttcctgtgtgcgtggcctgcaatcaatctgtgagatgggggcctgttagcacgaacccctcttgctttgctgagagtttttatttttcctttttttccttttcatccaataaattcccctaacctttcaatgtgtctgtgtgtctttttctggttgtgtgacaagaacttgcttttagctgaactaaagatcaaagttctgcaacattttggtgcccaaacattgggacatgagaaagcgtgagtaacacgcaaaccaaaaatctttttccctgtcacttttaagcctttgtggtctcagatttcttctgagggtagaggaaattatgccgcctaccccaccctgttactcccaggggtcaagaatgttgttggcctttttcttattttggggggaagaataattggttcttcccccaggctcaaccctgcactttaaacttttttttccttttctctaccctgtcaggagttaacacagtcctgaattttaagcttttttttttctcttttctctaccaggtcaggagttaacttttaagggatgctttttttctttttaaaagatgttttactagcccaggaataataaggatcattgctaatagtctttgtaaagttttaattatgaaaaaggatttgtgaggttggtgttaagctgtagccaatctggtgtactttgcgtgtctttctggatggtcagtagcaaactttgctgcaggtctccatcttgttttacctcctttgaagcatgacctgtaaccacgtggccatgctttgtttagcctcctccactgcgcgctctttaagaaaatccttttaagttttgttggtgaggggattatttttcaaatttgctacatttattacaaaaatattgtccaaaatttttaacaaacaatcacaaaacacaaagagacaggtaacttttacacaaacacagaatttttaaagacaggtaacaagaccacttgaaagagagtccagatgttgcaattaacaaaaatttcaa

SEQ ID NO: 70964 - DNA, 1261 bp, Homo sapiens
tcctagaaaatgttgatgcttgtagctgttagtctgtgtctgggctttaaagagttagatattttttgtagtcttcaatgtctggccttttttgttcccgtccttcttgggaaggctttccaggtatttgaagggacttgggccccaagctcaataatgctgtagtttttgcagacctgtagaggtatcaccttggtgttattggataagatccagaaacattctctgcaatataagcaaagactgttattcttttcccttactttttcccaaacaaatgaagtctctctctctctgtgctgagacacctagaagtgggggtgtggtgatgcaagctccccagtgatcaacaccactgggatggtgctgagtcatacctgaagccagcacagtaccaggtgtttcccaaagcgtttcctttcagggcagtgatttctaccaggaccgaggcatgtccagacatgctgccttggagccaggtatttaggtcaaataccttagcagtttactgggtgttctggtgtactgtggctgatttggcactcaaactacaatataaagtcattcctactcttctctcccctttctacaggcagagaagcctctccctgtatccaccaccaccactgatccatagggagttctgccaggccaccactgatattcccctaaagcccaagtgctcttcagccagcttttggtaaacgttgtcagtccggggactcacccttcagaacagtgggctcccctttggtccaaggcaggttcataaatgctgtccaagagcctaagcctggacttggggaccctaaaagcctgtttgttgctctaccccactctggacaagctggtacctaagctgcaagacaaagttccctttatttttccctctgcttttttcaaacaggagtctttcaacatagtcaccacagctgggaatgtgctaggtcacaccagaaatcagcatgtcttagtgccctaggcccatggcatactacctgggtattgttgatggtaacccagggcccaagggctctttagccagtaggtgatcaaccctgcaaaaactgtatccttcccttcctttttgacccatggtgtgttcataaatgtcatctgagagctagggcctaaaatgggggcctcacaatcctggtcagtgccctgtcctgctgtggctgagctggtatccaagatgcaagacaaagtcctgttacactgtgctcctctacttacacagataaaaaggagccacttttgt

SEQ ID NO: 70965 - DNA, 1992 bp, Homo sapiens
caccttgttttagttccctcatatcaattatctgatctgtaaatatataatttttttcataaatgtatttgcttgcttgttttcttcccccatagaatgtaagctccacaaggttggaagttcttttttaagtaactctaatccaaacacctaaaagaccactaggaatatagtaagcattcaataaatatttatcaaatgaatgaataatccagaaaggagccatttgcatcagacttcatatcactgctccatggagagtgaaagtctctctagttttcatgcctaccaaactagtagagatccagctttccttccagaagtaatataattttagtcctctttaatcctagttgtgtgaagactctaaaaggaaactaaagaatgttccataaatgcagtgttgctttgtactaattatctaaatataagtaaaccaacttctcagagtgacctaaaacaaaaaatatgcagggttatgccacttgcactgttgcttgttaagccaagaacaaaatgttacagagtggaatgagttccatccactgaagaaaacaaagccggttcactatgtcttcttcaatagtgatgctgctgacagattttgttgttaacaggtattcagtctatacccattcatgaaagggaagagttaattcctctgggtgagcaggaggaacaggtctcatggtcaaccttacattccagtttcctcttagagatgcacaaaacacatgggaacagaatgaaggttttgagaagtcctatatcaaaaaggctttgaatttggttaagccatgtttcccaattttgacccatccatgtgagcaaaatactgtaggaaaagcaagttcatggtccacagcattgacttgtatgcttgttttgtttagtgacaaactcttagtgggacagctaactagtgcacaagttcagtaagactgtacaagaatgtgaaccttcagtgaaggaacaatgggtcattcattttacaaggtacttaccattatccagatttctagaacaatattctagctctttagccaccacccccgcccccaaccaaactgcctagaaacctaatgtgtttgaatttcttcatacctagtttgcagctcttcaatcaaagtcattggagacaaggagtggtttttaaaatttccaatgatttagcacagttttagagggacatgcatggagccatgaagaaggaaggcagccaaatcaatagtgtcacatctgaggtcaatgggtgacagatgtcactgtcagacacacaaactgatcatttgcctgctctttagttttcccagagagggacttctaatgaacccacacggacttcaaggagttttctctttggaaaggatcatggtttttccataagaatgccaaaagaattaatcttttgtcacttgtgtttatttctcaagaggcttttagtcattgctgctccacagctctaagtgacaatagtgcacaggatacatttacttttttttttttaaggggaagccagccttcaaaacagtaacatcctggacattttccagaaagagagattacaaaactcacacctgtggcactaacagacatcagtgtctctctagtggttgcctgccaacttaactcaccaaataaacaggaagggaatctctcaagcctttatacatgtagccaggacattggcttttaaatgatgagacaagaaatactaaataataccttttattagcggaacatagctaaagtctcagaaaattgtaaagattattttgagtgttgttggcacctgaggcttgaattctgggagttttgcaaattctgcttgaagctaaagagactcttatttcaggtcagccagtgtggttatattgacacatctaaggttttgtctgttcagtcacatactcaacaggttaaattgatggctcggtcattcattcaaatgtctgaggggactaagtcctgctgtgctatggcagctttaaa

SEQ ID NO: 70966 - DNA, 714 bp, Homo sapiens
catagctgacctctctaaaagaatggtgaagaatttatcactgatatcagcatcctaataaatatatcatggatgaaaataatgatgtttgtttgctactactaagatttaaacagaatttatactagagtatgtaacagcttatagttaaaaaaccttgctaggggaaagatatgacctagattgccacaagataatttgaaacctgtctaaaaagcaaaccatctgactaattccacacgtaccattattcacacattttgaatctgctaatgtttcagttccgttaatgtttaatttggactaaaaattaactcactgagctaaaaattaactcacccagtctagtaccagagactggatgagttaagcaacaaacatttatttctcacagttctggaggctggggagtacaagatcagggtgccagcactgtcagttctggtgagggcccacttccttgtttacgaatagctattttcttgctatattctcacatgggagagagcagacaggcagacaggccctgtgtctcctcttctttttataagggtgctaatcccattcatgaggtctccatccttatgatgtaatttccccccaaaaggacccaattcccaaaactaccatattggtataagggttttaatatattaatttggggggtgggacaaaaatattcagttcattgcagttaataatgaacataaccag

SEQ ID NO: 70967 - DNA, 1622 bp, Homo sapiens
ttgattcctgcttctgccattcaccagctttataaccttaagcatacctggtatttaattcattgttctttattttttctgatctgtataatgtaggcacctcataggattgtagggagagttaaaggaattactatctgtaaagtgcttaaagtggtgcctgctgaaaagtaattgcactcaatgttagctattatcaatattattagtatttgttcaattcaacaaatatttattttctagccaccatgtgtcagatgctctgctagccattggtaatacagaggtgactaagaatcagtctttgtcatcaaaaaagcttacttaatgtggaaaaaatagacacacgtgtccatgtcaatgcaatgtgataagtatttgaaaagaacaattgctcagtgctcttagcatacaaaggggattcactcaacccaacaatggggagggaaaagtggaggagtagggtatatttgatatggaaaactcaaatcacaacttcctctctattcccttttctcattaagagagagaacatccttggtagattatttactcctctccaaacctaaaagtgactcaccaaaatttatgtcaggacaagatattctgatttcaactctagcttggcaaccaagagtcaccattataagacatgacagagttgctctgcaggacaagttgggaaacaactacaaaatcatgttgtaaacttcacagggagtcaagatttcacagggtgccagcctttcataacatagtttccacattcagtgagcattttatggtaagcttccaaagattgtgtttcacaacaaataactaaactctctgccaaagacttgagcttgtataaactcaagataaacatgagtctgaattgcatctctacttaaaaaaaaaaaaaaaaagacatgacgatggcttgtattaactggcatatattatcaaggaagtattaggttactctccaaccataggtcacaatcttacaagagccagactgaatatttaagaaagagacataaaaaatctgatattgattaaaagaccaacgtataagactggaatggattaaaggaatacggaaagctttccaactaattcagtaagtactacccgctctgagacaaggaaaaataagtgatttcttgcccataagagctcatggtctagtcggaaaaacaaagtgcacatacagaaaattgaacgctgtcaactcttaaacaatatgaacataaagtctaggtttgagcaattgggattttagctagatttttaacaaggattatacatcttttgtgaaaaacttataatgacctttcaacacctataggagaaatctggttttctcactttattccacactgtatcccaataatcccctggtcaagctagaaaggcttaacagtaggcctcaagtttcccatctgaaatatttttctgtacaaatcctaaccatgggtaactatattaatcccatctcctccattaaacttttgtagctatagcaccctatgctctgaacctccactgaatactcctaccacttatcaggagtctccagtctgatatcctttggcaatccccacctctaccacaaaaaatgggtcatgattgaagaa

SEQ ID NO: 70968 - DNA, 2076 bp, Homo sapiens
cagcactcccggtggttttcctataggatgccagttcccttgccaatcaagtctttccacagactgtagcaggaccacacccccggagaggcctcagggagggaaggtgctgtggcccacagaagtgaaagctgatactcaggttgacccgccagtgaaacttacaggcggatcttcccgggcctcagtttccccatctctaaaatgggctacccttcctttctcttgactagttccctccctgttctcgctgggccactaggaagtgaaatcagtgcctaaccgcagctgaaagtgctctgttaggctccagtcaccgcgccgggcatgctcagtagctggggccggctcggctgcgggagtaggaagcagctttgcgcgcccgggcggccgatgcgggcactttgaagaatcacgtgtgttgaggccctcttaaagagataggcacctacttttccctccaccctaaacaccgccctgagggcggcggcgaccgtggtaattgcaactgctcaggggcagggcttgccccagcgccgagtagtggcaacggcgtggttgcgtcgggggtgcctgggagcctggagtcccgggggcctgaaatcggcagcttcccgggcagacactctctccctcaggaagaggtgccgccgagtcagcgcggggcagtgtgagcgccccgaggtgctttctcagttgaggagaggtggggttacagggcacaggtgacagggccggagaaagatggagcagcccggggcggcggcgtcgggagcgggaggcggcagcgaggaacccggtgggggccggagcaacaagcggagcgcggggaaccgggccgccaatgaagaggaaacgaaaaacaaacccaaattggtgagtgctcccgcagcccccgccggccttagggacagggagagccccgggatcctcctgccattgaacacgggggcacccggggccccctcccaaggatgaccgcgacctcgctgtgcaactcggggagccgctaaaggagtggccacgccgaggcgcggagacggcgtgggggcggaagagcacccccttctctacttaacccctttctcactcttgtcagcccgggaggcggtgcgggaaggagaaaggcccagccccaacttggggacaccccgagtactgggtagggctgttgtttgtctaacttgtgggcgcaaacctttgcgcgattccattctcctcccacttcttgttagttgctgttttgcctcctaacgcgtagggtccggggcaggggaacctccctcctttttattccaagtccttgggagcccacctacagcttcgcaaatcaagaagaacactatttatgctcccagtctttctactttaccagaaatctcaggaagaggcgcctacgtgcctttttcctcctccttgcctctctccatgtgctctcccaagaaatgtttctttggaagggtgggggcgcgtgggagtttgaggctgggtgaggtaccaccaactgtcgagtgtgtgtaataggcatagtcatacagtacttccacttagttgattaagaacgctcaaaagcagtaggcacaaactgtgcaaatctcaccgtgctgatagtgtgaaccgatggtagcagtccatttcctgccactgaatgtgcagaggaatgaaatcgatgaggcctggtattgcattgggaaatactggagtttcctcagctcatcagaagggttccgctttttgtaaactttctaatttgggtggtgtgaggggaaagggttttcctgtacaaattcagcagatactccttagagctgtattcttagtccagatccgaagcacaagccacatgttgaatgtatagatttcagctttaactaccaacttgattataatagacaaggagagggtgacatataaataaagccgtttcttatggcatctggccatttggtttggatccagtacaaaactgtggtttaatcagtgattaaaaatttaagtaaaaagttaactgatagtttccacaaatggtttggtacgtctagcaagaatctgccacttttaagaagtatgctttcg

SEQ ID NO: 70969 - DNA, 780 bp, Homo sapiens
cttcttactgggtccaccagaccagcttgattccctagttttgttgatatgcagaacctcctaaagaagcatctcagacaaaaggcttatcttctcacaatgtctgagattttatctatagaaccggaagagaacagagaatcttgtgacaaaggctatgttatcctggggtggtaagtagaaaccagttacaaggaagtgggccaaagggcaagctggcttaatgattgctgctgcaaacctagttggattttattttattttatcttattattttattttatttttcttaaacaatttcattaaattatcttgggaacagtgtcagatatatatatattgctaaggcatactttctctggctgcccagtatcccactgtatgaaatgtttaacttatcacctactgtcgtggatttcgaaatctggttaatgatttatcttagttaatcttagttactttggaataaaaatctgatgaaacctttcagcagctagagtttgctcaggatcttggtcttaagtctggttttagccatttttaggtatgctagttactgtatcctccaaatgttaataatttataattttgattccaaaaatagattaaacacatagaatttattatatattgatcacagagagataccatataccaaacacttaaattccattggcatggttacatattgaagcttttagtgtaaatggagcagactttaaaaattaataaatttggaacatatggaatgatcatttcctttgaattcttcttatttta

SEQ ID NO: 70970 - DNA, 3002 bp, Homo sapiens
gttttgtttgttgtcatatttttgttgttgtttgagatgggacataagagactagttgcttgtctcacagatatggtagggaaaggaaaccttttggtggaagttagccatctcttcaatctctgatattcaaggagtacccagttttggttcaccaaatgtaagtcctttgttataagcatcctcttttatgttggtttgtttggcctgtagacagtttctgaaactaatttcttatttgcatgtaatgctttcatataatattcatctgtaaaaccatttggatttttcgagttgatacatttttatcattctgctgcacctctctcccctccttctttgggcttgttgcactgtcatgctcctcctgatgcattgcttcctggtgggtgacatcatgatttgtgagcaacccgatatataaataaggtggtgagaactgcctcagcaattcagtttctatttgaaaggcattaagcagcctctttctgttttcttacatttttctctactttgtgttttcacagttttattaggcactgtagaaggacctgtttttctctttcattacatttctgaaaatcattaggttgattcaaaatcttttggaaatgtaatgcccccttatgctataatatacctctcatactgtatacattttggtcacacccagatgtggagtttagcaataactaacaactactaatttttaggagcatcctaggaatacagatgctttcagcagtatgtttttattttcactgatattaaaggagtatttatcttagaagagtggtaggaaagcacacatgaatttggaccttaatccttgactatgtagacattgaatattcataggtgttttgtgtgctatggtaggtgtggaaatatatgtgagatcaatatcacttcacctcaatatcttcaaaagtgaatatggatatggttttgttagctgaactcattagcaaagatgccttttaaaaatagcaaaggttacagtatatataatgtatgtgtgaatatccacatattattagatagattccaacatgagtatttgtatgtgtttctgttaacaatataatttactatcacagcttatttttcaaaattccattgaagtataaagctggttagaaagatatacggcatctttttctttttttcagctctcctaaggtataattgacaaataaattgtacatattgacagtgtactatgtgatgttttgacatatgtatacattgtgaaatgattaaatcaatctaattaacatattcatcacctcatatacttttttggtggtgagaacattttagatctactctctgagcaattttttagggtacaatacagtattattaactataaccaccatgctgtacaatcagtctccagaacttattcatcctgtctaactggaactttgtactctttaaccaacatctgcccatctcttcccccagctgttggcaaccaccactctttctgcttttatgagattgacttttttagattgcacatctaagtgagatcatgcagtatttgtttttgtgtaaacaagcatacagtattgatgtcaaggtcttgtattacccaccttagaacaagacagtaggatcattatttttattcagttaatgttcatttatacttacccacatattattcatttttttttttttttttagacaagggagtctcactgtgttgctcaggctggccacgaactcctgggctcaagtgatcctcctgcgtcagcctccccactagctaggattacaggagtataccatggccctagctccacattttactcttcattcttttttagcatttcagagcatccatctggaattaactctttttgcctgaaatactctttcctttgggcaatgatagcaaagtatttgggcagagcttcttcaggaactttctgagtcaagtcagacccaagccttgtcccacccctcccccaaggcatgggacctttgcccttcttgttaacctcctatgatctttcattcctattgtcccatctcactaacagtgttcctcgtgtgttctgactcatcactttagctgattctctctcatcccttagtttacctggtttcattttctgatttagggccttgcatagtctgattgattagtctcagtttcaagtcataacctccttgctttctcgaggttcatccagccccactcccctcaccccaccccttgttaattagcaggccaatgtactaccatctttcagcctgagtttcttctgaaagaacactgctgttctctgttgatactgtagcatcttggcaggtgcctcaggaaccctgctactgtgggtttagtacttcagattcttgccatgctgcagcttcagcataacctgggaactggttagaaatgcaaagtttctggcttcactctaaacccactgaataagaaactgggtgggggtaaggggacagcaatccattttctaacaacctccctaggtgattctgatgtacactaaagtttaagaaccctagagcccaatgactcatcttatttcacaagtgtggcaactgagttactccaggtccataaagccagtttagtgctaaacagtagagccaggagtagcctacttcagcccaccaccttgtctactaggcttctctatgttacttgtgctgaacattgtttttagttaaatattagaactgagtcatgacattgctgtacatttgcaaatgagaggcttgtcctctaagctttgcattccttctgccagtgacagtatcagtcagaatcaagtagttctcagtgacaaagtgggaggatacccttggcattggactctttacagggaactcagtagagtctttgtgttgttcattatggctttggttgatgtataatatattgccatgttcttaaaactaaaacatgctagaataaactcaacaagtgataaggaatgatcatttgcatcgtgtgtgtgtgtgtg

SEQ ID NO: 70971 - DNA, 484 bp, Homo sapiens
ccctcacaacactggttttcacctccattgccccaacctgctattctacacattagttgtgggtaagaaaaactggggggaaaaatcaggaaaatataggtgtctaagcattgtttcaagtcttttatctgtcttaagtctcagcattctgtctggtttatgggggggaaaaaaaaccaagagcgacgatacacattactccaaataaaccctctcttaatttatgtaaaattgttctaatcttggtgggggtgggggaagaagcgtttaaaagggatagataaaaattcctggatgaaattcttggttgccagcctttttggaattatgacctcatcaccactggaatttacaagtgtttgtgatagtgagtaaggcatcaagtagataattaaccttttgtatttctatattaatgatttcatcaattagtatacacaattgcaaaatgactacataattattttgctctcaaaaaagtcta

SEQ ID NO: 70972 - DNA, 438 bp, Homo sapiens
agcatggagcttgctttttttaattggcagataattttacacttaatatttctctctcagctccatacgttatcagtttaattactctgaggcctcaataaaaaaattaaggaaactaaagtaggagagtttgcagtttacactcagctgttctgagttcactgaaagtgaaatgccaagctgccagggatctactgcatgaagctctcgtgaggctcctgagtgggccgagaagtggcagatgagcttcgtgtggatacggtaaagcatttagtgaaaaatgaaagtgaaagaagctaggctgcattcacaggctggcaggctttgccttctcagtttcaaacttgaaaaagggatctaggagtgactggtaaccattctgtgaaaaaaaaaaaattagctcaggaaggtgttgtaatcacaatggtccacactctg

SEQ ID NO: 70973 - DNA, 1335 bp, Homo sapiens
aatgaagagataaatgataatgcaagaggagggtacagggcttacctctgaagacatgacttgaaactccaatgtaaaatatccagggaggcaggctgaccttgagcttggttcagaagggaattgagaggggagagatgtaatctggaaggtagggtagggaagcagcacccagatctccaagggtcatgcccagcacgcaagataatgggtctagtctaggaaacaacaataactttagtccccatctactaatatggttgaaacttccaatatattttctgccctggtcaggactagcttaatcacttggcagggctgagcctgtagacaccttacattagtgactccagctgaacaggcctgacatcaggtgtctttgttttatttgtaccataatagaaaaggagagataaaactcacaagctacagggttaagcttagcaggtgtgtacagaaacatctgaacacacacagcaggattctcacttaaagatccagacccagatatacagactcatattcagatccacatttgagagtcaatattcaatcatttttcaagtgactgcttattcctaccttaccttaatttatgcagaaagctaatacttatgcattgtatatattcacggcttaaaataaagggccgttgaataaatctaaagatgagttttgaacaggtcttttgcctgtgttctctttttcttcccgcaactgactaatgctagattccaaaggtcacttgtctttagcaattactctgaagcactacatcctacctgcagccttttaaacattctagcctaaagaggattcattctattttcttggaaataaatgtgaactgtcaatcgaatgccactaataaacgtttctaattgatgtttgaagagggggatttttttcccttaggcaggctgccttttatcttagtcagtggccttgttgtttataaaaaaattatttgtgcattcataaagcataggatgagagttaaaggacaatacttcccttttctgtttgtcaaattggataaaggcaccattagtactgaagggtttttcttttctcatgatttaaggccagtatgttttaacagccaaatcaaacacagattcagatatcagtttcactttcatgaaatgaaaatatctacccccatcaaatgcctgaggccaaatcatgtgttgccaagtttgaattttgctccctccattccctacttcagtgccccatcattttttttttaattgtaatatggggattacagtagctacctcatagaggtcctgtgaaaattagggtaaataagataaccattgtggttgttgg

SEQ ID NO: 70974 - DNA, 623 bp, Homo sapiens
tgctgcaatcgaaattttttttttccaaatggttgacccaaacctctctgcataacttttaaagtccttgatagtatgtttctgtaaaactttattctcactagtgtatatatggtgcatctagtcaggcttacattcatagttaagaaaaatatgtaacttcatttcatttcaggtcctaggtcaagctttcacttcagctcctaataggtcctgggccaagctgagcagcccctgtgaatcatcacttcatctcctgattagtcccaggtcaaggtcccggaccaagctgagtcacagtttccctgattagtcccaggtcaaggtcccggaccaagctgagtcacagtttctccaagacaggccacagactaagcacattcctcccccttcccagttcataaaaaccgcagactctagcctcatagtgggcaacacattcagcacccccctgccaccggcacctcagctgcagagagctttctttttttgcttattaaactttcactccagcctcactcttgtgtccatgctccttaattctcttggatgtgagacaaagaactctgggtactatctcagaaaatgagagactactacattttggtgcattggcaggacta

SEQ ID NO: 70975 - DNA, 830 bp, Homo sapiens
gaaccaaggctctgtatgaattcatttgttgtggacagctgctgtgcagtggctttctcagaggttgcttgttgtggtaacatattggacatatgagccagcacactatattttgtgaggcagagactgcagagttctcagaaagcttatctcttgcactagcactatgtccttgtggcagcaggattttggtttggtggttcagttcagacatcagtccattagctgacacttatgagtagagccagctcacacccaggcaggctgattatgaatggaagcacccatcctgcaagggggcagattggtaggtgaagatcatgttgaggttcactgaaatctctggggaagcagcaggtgtgtgcaccaagtctgtcctcagcagttaggaatgtcatctacttctctattgcaaccctatcacagaggtcacgacctccagttggaatagactttgtcctttggctccaagccacaatgtggctgcaaaccacaataagtccttctggtggctaatgcactaatgggtttagggcagagcctctttgccctgtccagatttgacaattctgttgtttgtctgccttctgttgacaagatactggaattctgtgtagggagggagagttgggccctgccctttatgcaagcccagtaggcacagacacactttcaaggtggatggatccttcacacacacacacacacacacacacacacaaagtgttttctgcaagtgcataagcagtgccccccagaggggggtacctctgttgcaatcacaacagtagacaggggagcaggatgactccctttccatgtctattact

SEQ ID NO: 70976 - DNA, 998 bp, Homo sapiens
actacattagatctgcatgacctggtattaaaaaaaatgtaagaggcatttttaaatgaggaaaaaccaaggtaaggaacggcttgtataataaaataatagctaaccaggtgagacttctggaatggcgcagtgaggatctccgtaaatccactcctccataaaatcaatgaaaatgctgggaaaattataaaaatcaactttatttttttttttattttttttttttttacaaatctggaaattaacccaaggtctaaagcaatctgaggagcatttattcaagaaaaaccacagcacctatgtaagaaaactacatttttaacttggcctactcccatgtttctctccccagctccacagttcccttgaaaaccagccaactcacagccagaggagctgtaaaaacaaaacaaacaaaaaaatcaaaaacaaaaaaagacagcagctttacagccactagagggggcagactgggtttggagctcctcaaaaaacttctatcccacagcattgttactgtttgacttgtcgcatacctctctgggaaagccccatttatacagtgctttcatatgtgacctgactctgagcttgctcgacaagaaaagccctatctttagtgcatttatcaaaaataatcagctgcaattgtttaacatcacaactgcctgaggtgattatacacgtttgggcaagccagggcctgtccaaaaacttaaaagaaagatctaaggaatgcaatgtttgtagtgggctttaaagaacttgagaccagcctggccaacatggtaaaaccctgtctctactaaaaatacaaaaattggccaggtgtggtggtgcacacccataatctcagctactcgggaggctgaggcaggagaatcgcttgaacctgggaggcggaggttgcagtgagccaagatcatgccactgcactccagtctgggtgacagagcaaaattctgtctcacacacacaaaaaaaagggtttaaaa

SEQ ID NO: 70977 - DNA, 1078 bp, Homo sapiens
aaccttgaaggggaaaaaaaaaacgtgattttatgagttccagaaacttcccccgtcctctccaggtagggatgggcacagggtacaaaggactggtacacaaaagcaagcccaaggatagactggcgggagtggaggcataccatacttacctgcgaaacactcctctcttacgaagcagtgaaaagaaagacactattatgcaagtgagccctcaaaggggccgggcaagccttgcttgcctttgcaaaggtccagggtcaccgtctgcgtgctctgggggcttaaggccccacctcgcctcccgtatcgaactcgaacgctggtacgtctgggtcccagctcagcctctcggctgccttcgtcccgcactccgaccccagcgccggcgagatgcctgagctctttgttcggggcccagtcactggtcgccggcgtcggggtcccaggcgcgatggccgcccaaaccccacaccgttcccgacctgagctcccgccgctcagggtcacaccccccacaactaaaagcccgggatcccctgccggccccaggcgccttcgtctctcacccagaaaataaaagtgtagattagcagaacgctcttgaaacaagtaatgactggtttagtctgcagtctccgagacggggacgccatgactagcccgagaccctgcaccaccgcaccgggcgattggaacacagagagcgagacgcggagtccccgagtctccccggaaactgccgaaaacttacgagcgtccacaactgagaagggccggaaacactgtacaattttgtagagggtaaagtatgggaggctgtccggaaagtggcaacaatttcagagcgccccctgccgaaggttaccgaaaactatatacaaaggttctagtgtcggaaatttcataggtcttcaagtggagctttcttcattgttttttttctatcctaaggaatctttcccgccccccacccctcccctctccttataacttcaccatattgtttctatcaccagcagagcccgcagcgctctgagattgggcctccctggcccctggtgccctagagagaagg

SEQ ID NO: 70978 - DNA, 1501 bp, Homo sapiens
catcagagaccactgggaagcagctagatttgctcaaacagcctcccagtaaagcctctccaggcatgctttccctccattcttagtgtgggaaatcagtcttgatccttcgggcaagaagtacatgttttttgttttttgttttttgtgttttttttgtaaacaatataatcttaacagaaactgaagtccagagaagttaggtcactggcatgagggtttcaaagcgtatctgacgtgataccatatagattgcaagacagttcagagttgggagtctaaggaattacaggagaaatcttagggaatgtcaaagtcagctacagtcttcccctctctttggtgtttgtgagtgtttatgaaattccttttcattcaattcttatgtcatgctgagtcataaaaagaagtgttcttcagtgcaacacatctctggaggccgcttaagccagcctctgtgttagtcatcactatattcacaggcttggagccagtgccattcacacttccccctcttctgcagcagacggactgagttcctctaatccctgtgttccttctcccccatctttctaaaacccttctctgagagaggaataactatagcttcagggataatatagctttaaggaaacttttggcagatgtggacgtcgtaacatctgggcagtgttaacagaatcccggaggccgggacagaccaggagccactcgttctaggaatgttaaagtagaaggttttttccaattgatgagaggagcagagaggaaggagaaagaggaggagagagaaaaagggcacaaaataccataaaacaggtaagatctgcaactaacccctccacactccactaccccaattcacaattgtgaaggggataaggagacccagaacttgggcaacatggctgggggtggaggtcggggggaagttcttttatgaagctggatcatatgctgcttttcatttgtgccgtgacctgactgcaaacacatgttcccagcaacttctcagcccacagcagagggatgggatggttgactctggtgagtcaagtattaagcctgagattggggagaagctgggcaggtacgaggtcacaggttcagggatctgaaaaaggaatgcctctgctccagaacgaaggaactggatggaggctagatgtgggagaggggtcagtgattagttatctaatgttcacttcctggacctctctttaatctcctctttctgctccttttgttgcctctttctgcgtttatctatctctttccttcagctctgtcagattttctttccttccttcccacatctttctacttcccttgcctccttcgtttactctcactttttctccgtcctgcttccctgtcactttctagacaaaatctgaagccaagtagcaatgaactaaaaaatacacttttccctttcttgggctttgcatgtcccttagggactctggccagaatctaccacatttttgtttctctattt

SEQ ID NO: 70979 - DNA, 5185 bp, Homo sapiens
agtcactttcctttgccctggtacttcaggccatatacatcttttcttgtctccataatcctccctttcaaggatggccagtcagctaactcaaagaggagctctctttctgctgttcttcctaactccggcagtgacaccaacatggtatgcaggtaagttctaggagctgttgcctattatttccaggaaggataggtcctagaccaagacttggagaaggaagagttagactacaaaaagagacacttattttctatacagagaagtattaaaggacaataaagatggttaaacatggcaacagactaccaagggaggcttttaaggcagcctaacaagagctatttgaaataggtgaaataggccacactagtacaaacatgagaaggttggacatcacctttgaggccattgtctcacctgcttgtgcacttagcttcctgaaaaccattttctaacatgaaatcctttatgagtcaaatctttattaatattaattcttttatgagtcaaatactcttgtcaagaccacaaaaatggacttagaccacatacctcatttggaaaaaataaggggggcaggcaatctattcaagtgaaatgagaatccatcagacttcttcccaccctctctgatcttatttataaaatgagattttttatagcccttttatgccaaagctgttagtggcaatacagatcacatccttttaatcaggaatttcccagtttcttctcatttgttctttacttcagaagggatggagatttctggattcctgaatatttcactcttcacccagagagccagagaacaaactcagtgagaagagggaaaggggagggggaagggatgagggcaggataatgaagtggcatacagaggttttatatggggcccagctggcattccaagtgctaagaatattctgtggcctgcagtgtctgccctcacaggggcccgtggggagtagtgggggaaggagacagacccaaccaatggggttaggaaaatatccagagatgagtaaataacaaactgctcccatcacagccacagtccctgcagctaaaattttccacatgcccttagctcctggtggaggcctttggcagtagctctgtttgtctggaacagctgcatcaagctttcaaacaaatatgcaaacttcttcccctttttggcttaacctggctttgtagggggtgaagcacaaggactgacattgagatgaaaaaattcaagtcaagcccttggcagagcatatcctgtttggggttaaaggtgcctcaagtctccaggagataaatatgcaactgtcctccccaacctccccttgcttcagttcatttacagagaccaaaatccagccaaagaccacaggactaaaggagtggagattagatggctcgaagcccaattctgaacacctgtatgaaacctcatggcatgcaaaggtctttacctttcccaaaacagaagcctgagctgttggaggcgtgagcacagagcagttttttaaaagttagattcagttgaggttctcaaagggctatttgcaaaggtggaacaccccacttccacgtgaatcacaagtcaccactcctgagaagctcagattggtgaggcctctgccagccctgcaattccactcattcttccctcttctatccttaggaggccacatgatgagagacatttcccctacactgctagctcagctgttgggcttgccttcatgcctttgttcattcattccttcaacaaatatttattgaggactctttatgcatccaggacagttttgtttacttgtacagccttgtcttcaaatgggcatggcacagaatagcagccaaatgtggatccagggctaatcagaaaaagggtccaggaataatcagcagtggctgggaaaagttaagaatataaataaagcaaagaatgggttaaaagtgtgttctggcatatctgtgcagcccagaaagtcagactgtatttgtcatcataagccaaggattaatatgaatcttaagatagtcttttaactatcaattacatgtctaactatacttttgtgaagggcagtgcttagagggcctgactgtactatggaggttggaggaacccagtaacagaccacacagtaaccaagcactgattgatctaaaggaactgaggaatgctccccaagtccttcccccagggctgaagagggacaagcagacagaataatgtaggaaatgttcccctttaatttcattcttatacccatcttagtattccaccatttgcaaaaaagaaaaaaaactcaaagataggcaaagaggggaaatgggaaaatggaaaggtttaaagtggcaagatggtctgaaccctttctccacacaaagcatagttggcactggtccagctacttccgcaccctgatggagactgtaattatcttattgagtcttccccacagttttcctacatcccttgtaattctggaatgatgtaaaatgcttggtggccttcgatcccacacacacagtaaaaaagctggattgcaaaagagattttggacttttaccccagttggacattatcaaaagctcttccctaatcaccatcttcagtggagtgtctgagtttggtatctagggggtcaagcagacctgggctggaatgcccactctgctgcttactagctgggagaccttggttctcttggttcctcaagcctgtttcttcggctttatattggagcacattagtagtacctaccctgctgacatgttatggtgacataatgaactaacatatgtaatgtgcttaacacagaatatgagctgagagatgttagcagtcattgtcgtagttgttcttgttgttgttactgttaccaagccacagggctctgacactcctgacactcctgttttctcttctgttaaacagtcctttgctccctgctgagcatgtcttcaaaagctggctctgtaaccggagcaggaagacctaatactttagggaatcacccacatctggcctcctgtttacaggacctataaagctttgaggctaatactgaactgaaacagctgacaaaaattccatgacccgccccccgactcccccgcacccaccaaagaaacctcccattatgggaaaaaagagagcaggggagatgaggtctgagaagaaatcaacggaagccagaagaagaactgaaatgggaaaacagaaaaaaagaaaaaggggaaaaagaaaaaatgaactctttcctctggaatgagggcaaaccaacgaggacatgatttcataaggcaaactttcaattgattcattcccttgttcaccaagttggactggtttcccaatacctcacctcccccacccctagtctgggcctgtggggaatggaggagcttcatcatctggccctctgctccgcccttcagtgcagggggccctgtgcctcttcccaagaggaggaggcgagcttgtggcctgagtatttacacaggccaaagggctccagcactaaaacccagccctgtcctggaagcacaccctctcctggaaatagggaattgtctcttgactccaaaacagctggctaccctattcctgtgcatgcattagggctcagggaggctggaaggagggcttccggaaacttcactccggaaaggaccaagttgttttccaattagttcgtattcatgaccgatttcctgccgtctggtggaacatactgtttagtctcccagacagccgcagacctgcctccactagggactgggccacttaactggatggagatagattaggaatgttctctagctcagcagctccctgttaaagttccttctgattagagaaacaggaaatttatccgaaggactctgccttctctgttctccaaaccagggcaaagtgctcacaaaactgctttcatttcctcttgccttttaagtcatccctctcggccttggcatgccacccccagcaatggtaatccggtaatccgatgacaaaaaggcctgtgccctgtgggctagtggaagcctgagtaattgtttttttttgaggaccataagcagggctgtcactagggggaagacacaggttctgtttttgcctcctatcagggaccacagtccattctcagagattagtccccagtgtcttaccaagactcatgtgttgcttcaaggaaatgggtcatttatagtccagattgacaggattgatgtatggtcaggttcaatttttttcttttagatggagtcttccagtgctcgcagtaactggccaccacaactatgagcctgccctctatgcaactgaggtgctgagattcacccacagtagttctgctgccttacaatgcaggatttcccccactaaatatccacctggctccccacccatggaatgccatgtcctaaggaagtgacaaagttggatgagagggggaaggttgggaaggaattgagtgagaaatcaagacaccattttgatattgtcttccttattctaggttctggctactatccggatgaaagctacaatgaagtatatgcagaggaggtcccacaggctcctgccctggactaccgaggtaatctaccctgcttctcaagcccagaaaatctcttttctggcctcagacctaggcccttccctgaagcatccccatcaggcttggctcacatgtgtcaaaactgtagcacagggaatcaggggctgtgatttctcatcatgaacttggttactgacttactgtgtgacctcacctctccagcctgaaggttctccatgtattattaatcattaagtattgactagttactcaatgcctaatcctgtgcaaggtaagcctgtgggtaatacaaggtctcagatagggttttgtccccatcatgtagcttatattctgttgggggtgatgggggggtataaagttagcacatgtagggcaagtaagtgtgaagctatgtcatagcagtaaatgcaatagggtttaagaaaaagaagtcaggaaaagggtcatgaaagatgacatttaggctaagcttagaatgataggtgggattttgagaaccagaaaggggaggggagagcattcagcaaagcagatggctaaaaatacggaagtaagaacaaacctggtagaggagggagctaaga

SEQ ID NO: 70980 - DNA, 924 bp, Homo sapiens
ccacggactacacgaggacagaggtctgttctccctttacctctcccatttctttaactatgcttctctcggctggcatgccctttcctcatctcactccacacacgaacaggtttagcaaataatatgcacgctgctgggacgggcccaagcatttccctcccttgatagggcggaactaaaatgcaagccccacagttgtcagcaaaggacttccctgttaccatggtaaagccgctgcgcctttattgtggttgaggagtacttgcatcaacctaagagaaaattaataagaaggaagtctgcaggctgaaacccttcaaattagcctggactcgcctgcatctggctcggaacagagttaatctcaggagtgagaatatagccctccggtggacgcaactcgcgcctgcggctaacagaatgtctccaggggaggggctctgcgtccgttccgcccaggcccttccggctcacgcgccgtacggaagcgtgctcagcgctgggcttgtgctccgtacggaagtgtgctttggcgcaccggaagccgactcaacagagctatggcgggtttgactgtgagagacccagcggtggatcgttctctacgttctgtgttcggtgagaggaattcgttgtagtcaagcttcggggagggactcccctctgcaccttctatctcatgaatcgctaccggagccgctgacggttcggacgtgcagttctccctgcttatcctgtagggcgtccaacctggtggactcatgagcaaagagatattcccattctgccgaggtctcgtaggctttccgcaatatcagtggggaagttagactagcgttcagcttctgtgcgtttctcctttcatgagcttcaattattctctagaggagaaggctcacggtaacagctcctcactgtccc

SEQ ID NO: 70981 - DNA, 1037 bp, Homo sapiens
aaacaaatggagtctctctctctgtgctgagctgcctggagttggggaaggggtgatacaagcactcttgtggccacgaccactgagactgtgctgagtcacacatgaagccaacacagtactgagtctcacctaaggcctgtggcaactatttcctggctatccctgatatttattcaaggcccaagggcactttagtcagtaggtgatgaatcctgccaggacagggtatttcccttcagtgcagcaggttcctttctggtccagggtgggtctagaaatgccaccaggagctagggcctggggtcaggggctttagaaatctgcttggtgctttattttactggggctgagcaagtacccaggttgcaagacaaagtcctctttatatttctctcccctttcctcaagcagaattggccaccacagccccaagcccatagcgactatagcctggctaccaccaatgtttattcaaggcccgagggctctttagtctgcaggcagtgagtcctgccaggcctgggtctctcccttcagggcagtgtgttcctttctggcccaagatgagtctagaaatgccctccaggagctaaggcctggaatcagggacttcaggagtctgcttggtgctgtattttactgtggctgagctagtactgaagttgcaagacaaagtcctttttactcttctctctcctttcctcaagcaggagtctctcctgatggccaccactgctgaaaatgtgctgggtcacacctgaagccagcacaataccaggtcttggccaaggcccatggtgactactgcctggcgcttgcttgggatgtttactaaaggcctaagggctctttagtcaggtggtggtgaatcctgtcaagactgggtccttcctttcagggcactgggttcccttctggcccaggatgggtctagaaatgtcatcggggagccatggcctgaaatgggggcttcgggactctgcctggtactttattttcctgtggctgagctggtattcaagttgtaacacaat

SEQ ID NO: 70982 - DNA, 581 bp, Homo sapiens
tcatatggctctgggtatgtttctatcttatctttcagggacagacctgggctttctgactagagaattcactatgaataggtagagaggtccttctgctctgaatggttttcaattcctgcactccagtcctcacttgtcattcatgtgttaggtctacctgccagtagcactctgtcagcagggttgttaagcaatctatgacctctgtaggaaatgagtcatatagttagcacgcagcaaaggttaagaaagaacagtgataattcagggttggagcatggaaaccagtagtagctaaactagttataaatcccccagagattcaagtgttgggtgtttgggccataccagttgtgtttttatttttgttttagtggcagggtcttgctctatcacccagattgtagcgcagtgccacagtcatagcttgctgcaacctcgaactcctgggcttaagcaatcctcccaccttggcatcccaaagtgctgagactacaggtgtgagccactgtgcccagccccagttgtgttttgaatattgttctttcctctcaataacatcttcaaatcacttattt

SEQ ID NO: 70983 - DNA, 729 bp, Homo sapiens
tctgctcacccttccttcagctggaccggctccagacactattccttgctaaaccaaacaagcaaatgggttgactgctgtgtcgtgtcccgaatgcagcccacaggcagtcaggtccttgtctccccaacaagactccactagcccttccattcccttcttctttaggcaagttctgcccactgtgtctgtaggaagggttaacaaagaggagacactaggaaaggctaccactaaacttggccggtctgcagggcccgggaaggacagaaagtaagggagtgggaggagttagggcacaggcccacgctgggccgtacacgaccttgcgcagtcaccgtcgggtcccgtctccagccccgcctgcctcctccattccccgccccgcggacagtttggcatagtagggagttttctgtaaagcaagggttaaatcaggttttccgggctatttatccaccttaccttccttcgtaaccaataaatcctcttacaaacctgaggcggcaaactaaaaggccagcggatggcctggtttgctgcggcggggaaacagtcacttcctggtgcgcaaggcgcctctactcccgccgcacgcgcagccaacccttggcaagcgcggcgggacacggggctcctcccagcgtcggcgaggcagcaggctccggcacctcgactcctctcggggagtacccctccctactttgctgggggaaccttctatggaga

SEQ ID NO: 70984 - DNA, 1874 bp, Homo sapiens
cctaccaaagaagaaaaaaaatatgacttgagattctataaccttgtctacttaagctagagattcttgaatcctgtcatgatgaatggaaaattgaatgcattttcctaaggggttcatcatagcttacagttttttttcctttcttttcttttcttttttttttttgagacagagtctggctctgtcacccaggctggagtgcagtggcatgatctcactgtaacctccgccaggttcaagccattctcgtgcctcagcttcctgagtagctgggattacaggcgggtgccaccccgcccagctaattttttctatttttagtagagacagggcttcgccgtgttgcccagactggtctcgaactcctgacctcaagtgatccacccgcctcccaaagtgctgggattacaggcatgagccaccgcgccgggcagcttacagattcttgcaatagtacttaaccacacgccctcctagccccaaagtaacgaatcacagatatttttaaaaaagaatcaaagcactctggtccaaggcagaccagagttaagtaagcatctggtaggtgtcatagtccagcaatactgtaagtttatgggaaagggcctatggaaaccaatgactgtatatagttcaagttaagtggttcaaaaatttcgttcattattctctgccatgtacacaagcctcagaccctctaattccaaggaaaattatccttggcctctgaattctgtgaattgtgtacattaagggagatctgtccttggcaagcagaacacgttgttggcaagctgcaaataccttccacccttttgccaaagtcccctcacagggcaggctcaattcctcaaccttcagacccaaaacggcttggtattacacaacaatccaacaagaaagcaaataagtatgtacgttggaagagattacaccacttttatagttactgggctggagccactcatttttcagcggagagggttagaactgggtaatgaaggtaaatcccgaggagtccaggaatagcagattcactgattcactgactctctgggactcgggctgccaaaaataaaatcccagtactgggggctccgatcagtcttggtgaccagcactaggcagcttcaacctcgggtgcctgaaagtgctgggtgtccagtggcataagtcttctttgatacccagtcctctacaccaacaaagccgaggtccggaatgacagtccccagagaagcggagtcacccttctcccatccggctaggccacaggaacctgagaaaatcaagggttgctgccaggtgcccgccccccaccccgaatccccgacgttgtcgcgagtcccgcggtacaaggacagagggaaagtaggtacagtgttcaggtcccagccccaggctcctcacccaacaaagttcagtcatctggtgcaccagctgctggaagcgctgcttttgagtctctacctcgatgaaatgctgcaactgcgggtccactgcacccaaacccgccgcggaggaagaggaggaggaatccatcccagggcgaccaagcttgcagagacgaactccgcaccgaccttcacgtgtctccgcgacggaaccggaaccacagctagctgcctctgggaccgcccccgtgagtgcactgcgtcggcgcgaggcaggcgtccaactccaccccgccgcctcccacaccttggcgccggtgcttcgttcccggagtcggcgggttccactccccggaccccgcaatcccgtaaccccgcaaccctgccgttgcgcccagccttgcgccttgagatcgcagggcttacagcccagagccgaggtgccgttgagatgttactccaaaaagaaaagaaagg

SEQ ID NO: 70985 - DNA, 1335 bp, Homo sapiens
ctgcgaaaggtgttcccagtgaccttgaggtggaacaggaatggaacgtggaggtggaggaccccttcattcgaccctagtcctggcttccctcggggacggggaggccagaggatctgggaaaaacactgctcccttcactgaacgccactacgtagcagagtccaccaaaagagataaagtgacgaaacgttgaaagctgcggggcgggaggaagtcggggtgagtggaccaccctttaggcggagtccttccttaagctcccgcccgcggctccgaactgagtcctctcagccgcccgagggcgctgcgctgagccttacactctatgattgctcctaccgactcccatgaggaagtgcgatcgggaacctcctatatacttccgtttgcctcgcggtttctttctttccgcgccgatagcgctcacgcaagcatggtaggacttgctggtgggggccgagtaacatccagcttaatctttcccccccttcgtcgcccgtgctatgccgggatgggtccaggctcctgtgtggactcgatatatcagagcaacccaatcttgccgggatcaaccctaaagggaccgggctacggggccaggaattgaagtgatgggttcaaagaggtagagttagccgggggtggagttaatgaggtctcttccctctttggggctcgacggagggaggaagctctgcttgaagcacatggggctggcccaccctgtagtcagaggtagcaagtaatgaggagtcctcctggagtgcctcagctttagctgggtaaggtagggcgttgtgccattgtggtcaaataacattgcacgttctgaactgtttctttactaggttaacgtccctaaaacccgccggactttctgtaagaagtgtggcaagcaccaaccccataaagtgacacagtacaagaagggcaaggattctctgtacgcccagggtaagatggattccgcataatttggtgttaatgtgacatttgtgttgtagaataacatacgagtccgggtctctctccctccacgcctggcttgagcgttaatatttctgctgcgaaattaagataaaacctgtaagacttacttgctgatcttcagtattttataacaaataccaattcgttttcccaggaaagcggcgttatgacaggaagcagagtggctatggtgggcaaactaagccgattttccggaaaaaggtgagtggtagttactatttgacgtttcccagttaattgccgtaaggatatgcacttgtctctagtccacacacttcatgatataggtatagcgttagtttagcgaagttttcactgcac

SEQ ID NO: 70986 - DNA, 2359 bp, Homo sapiens
aactcacctgtgtgagataagaactatttttcagattttttttgtcagctccctgaaattaaaaggttgtaatcccaatttacagataaggattgtgagggtcagatatgttcaatacctatctaatccagcctcaaccctcacgcaaaggtgtaaatgtataaagttcctccatgtcaaccttccagcctgatgccacgctcatgggcgaggtgggagagatctcagcgaccttatggtctctctaactccctcgagatactgccgagaaatccacgaccccaaaaggagaaaaaatggcacgaatcttagttccccattcctcctacccaccctagatgttctaacggttagcacccggcagaggaagagcagaagttcacaagaagggtctgaatagaaccgggcagggctactttgggcacactgcctatggggtggccctgctctgcaaggagcagtgaaaaaagagaaccgggcagggagagagagaaagagagaggaaagaagagaaagagaaagagaaggagaacgagagagagagagagagagaaagaaacaggggccgctggccggactcccatcccaggaaaggtcacacagagaaagtttagggctagtcctgattcgggacagtttgctggggataaaaaagcagcagcagagtcgggtgggggagctctccctcgggctcaactgttcccgttgagactctccagttccccaaacacacccaaacacatggaaaagcaaagggaagggagtacccaatatctgatacctgatgcaggaatctggctcttcctggcagtcaaggttgcacatgaagcgctcccagtgcagccagcccatggtaggcgtccttgccaatccattgtccagtgctctagccccagggatgtcccaggaaacgagggccaggaagcgaagcgcaagcgcgcagcccagatgtagttctgggttcctcagctgcattgtcacggtgaccggacagcataaatttccgcgggtaacctgggcttttaagattaacctcaggggcggaccaatcaccgatgacttattaaataatgacgttattgtttctctggcaactgggacggttatccccagaggtagaccaataatcagtcacgtaagacgttccgctaaccaatcaccctcttcctttcttgatattgacccgccctatttccataccagaaggaagtgcggcaccttagtgatcccgagtttaagccgagagttgctcacgtgaccgagatctcacatgacgtaggcgctcacgtgattactcgcttacgtgagcagaagtagttctggtcgtcgtctaccgtctcgctatagccgtttgagggaagaaggaggaaaattacccggtatcgttagaggttggtgtgtgggtgggaactggggacccaggggtggtgatgatgaagaccagagcggggttcgggggccgcctccgcctctttcgttctctgctttcccctcccccctcgcgctctctccctcctcccccccatctcagtgccgggaagccgcctgtgctgcgcctggtggggaaatggtggacgctcatgactgtgtatgtgtttttgtatatctgtctgtctgggccggtctcgggggacccctaagggtgaccgtaaggcgaaaaacgtttgaaaaccacggccctgagttaagaaaaacagatactgaaaatagtggtctgagtgctggtctatccattcaggcactcagtctccactgcctgattgtctgtaaggggaggccccaagtgaattttatctgtagagtcacatctaggcaaatgcgtgcttgacaaaggcgcccaataaattactttactgaatagagtatttgaataatgtttatttttctgctgataacaacaatctacatattcaatttcgaacatttgaaaaataacaatatagtataaaatttaaaaatacacataattcaccacccggagacgactgctcaacctgatgtcgttacagttttttaaaaaatgtgtataacacacatataaatacacaaattcttaactcacaaagagtcctggttcccactttagccagcagtcctgatggccttcccaggagacgcagtaatgaagtagaacctctctgcccctacagaagggctcttaaggaatagagcggtgcagggaattaaatgggacgggttatcccagggataaggcaagcaaaaaaaaaaaaaaaaatcctgcaaaatgaaataaaaaaacagcttgtaaatctgtcactgagaccttaggatggttaataggaaaactgttatcactgcagatgcagtgtgctaggcacataatcggcaatcagtaaat

SEQ ID NO: 70987 - DNA, 1473 bp, Homo sapiens
atagctttatagtatttttttttctcataaaaagaatgcaggctgggggtgggggaggacggaacaaaaataacaaagtattaagaaagtaaaaaccacactctcattccagattttcttttctgatcgcttgttcctttcagatctgggactagatttcagaggaaatggtagactttcatagctcgggggaggggaggtggagggagaggctgctgtcccaggagcctagggaaggaagaggcaatttttcataaaagtacaagtggcccatagccccaggggaagatgccgtccctttctggtaatcggtggaagggaaacacaactacaaggtgatgagattatcgaagaagaaagagtaataaggcctggtgtgggggagggaaaggaggggggcgggccctcttctgccgcactgctggtgggaggggaaattggggacccgagttggtggatgacgtagccctcacgtgaccaagagctgacgtgtgcagaagtccttcttgtcctggtcgttgttcccgtctgagtaccagctccccactgccctgagggcgggccggcctgcggcggagggaaaaaggaagaggagaaggaaattgtcccgaatccctgcaggtcagtacctggaagattccataaagtcggggtgcttgagggcgtagggccgagaccgtcgcgggtactgaggcgcctccgtcgtctctcccactcgccgcccgctttccaagacatatgtcccgcttgcagcccatttcgatgctgcgaaacggtgagctgcggggtgtttggggaagagctcagagactgggaaatgggaatctgctgggagcctagggccgcaatccggaaagggagctgtggcctgggtgttggcccctagtccaccaggacagtgccggaggggaatggctggatatgggggcgggggtggtgagatgcaacgcgatatgtcagcagaaccccaagagaggtaataggggtgggaaacctctgacaaccaggcctccgaattagaaaagagttttgtgttctggggactagtccgtccaccaagcgctcagtggcggcagtttcccgtctttctgcctgtggctgtgtcttactgaccatggctctgtgtctagtgggtccaagcctctcccgggtggccagtctttctgtaggttgcggcacaacgccaggcaaaagaagaggaaggaatttaatcctaatcggtggaggtcgatttgagggtaagaccatctggggaccctaggagggacgggggtggcggcgggggtggggagaaggcagagaaggtaataatctaggtacatgtctgagtccgaatgtgtttcttgcactccccggactgtggcgaaatggcgtgctttgtgtgtctgtggttggggggaagtgggggaaatgacagcagggaaacctatcggatagtttgttcgtaatcctcctctctcaacagcacttact

SEQ ID NO: 70988 - DNA, 1331 bp, Homo sapiens
tctccgcccctttctccatcggtccccgttcccttatccttgaccctcttggcccacagcacttctatcttgcctcctctctcttccaaatcacacctcagcttcctacagcacactaaggtgtcctggctgggagagaaattatgtggtatttttttttcccttcaaactcctgcctcatgagtacctgcaattcttttgcctgggggcccccatcctttacaggtgggagaggtagggaaggccctctctgcttcagtccatcttgcacactcggggctaatacggcggggcggggcggggcgagcttggcctttactgcgccacggcaggtgggggtggggcagtggcgaaccgcgcccagcccaatctcggacgggctgaagagaggcagcgaaggagatggggccgcccccgcaccccgggacgggaactcaccttctctgaggcaagggcgggtgtctactttaaaactactgccccccctccccgccgccgccatagtggagccgccaaagccgccgccgccgccgtcgccacagccaccggcaggcgggcaggcaggggcggaggtggcggaggaggcaggaacaattactgccgccgccgccgccgccgccgccgctgccgcgcaggcggtgtaggaggaggaggaggcggcagagacggtagcttcctgaggggaagactccgccgccagcggggtgactgtgctcggcgccgccgccatcgcagcgaggcgcgcggacaattgcacttgcgtctcgattccgttaagctcctttagccccgccttccgttagccccaccccctttgttcctctttttaacgcttcagctcgagcctcgttctcgctcctcagtccaccaatcggagagctttaagcccgccggccgtttccccctcccccactgccttgcgtcaccccacctccctttggaggggaagcaacgacggccaagggcaaagggcaaaaagcgcgggatgtgaaagcacgtgggcctcgcacagtgaggcttctttggagatctaatctaaaaccaatttaagaggaaaaaatgtctggaaactattgatctcacctccaaaatatctctgaaatatatcttcacctggctttttttttctctttctttttttttttttttttttttttttttgagggagagtctcgccctgtagcccaggctggagtgcagtggtgcgatctcactcactgctacctctgcctcccgggtcctggttcaagcaattttgcctcagtgtcccgagtagctgggattacaggcatgtgccaccatgcccagctaatttttgtatttttagtaga

SEQ ID NO: 70989 - DNA, 1347 bp, Homo sapiens
aaagccttaggaaaaatagctaatgcatgccaggcttaatacctaggtcataggttgattggtgcagcaagccaccacggcacacgtttgcctatttaacaaacacgcacatcctgcacatgtatcctagaacttaaaaaaaaaaaaaagaaaatgaaaattaagggctgggagggaggactcgaaggaacacaaagtttgtggaatcgattagtatgtatcctcctatctcagtcttgactctctttgctgactttcctaccctgggccccaccccgagaccgcccatttcagtgggcctctgtgtttggagaacgaacttcgaaagactggaacacttccgcctgtcaggccagaagagatttcctgacaccacagctggaaacccatgtgcatttcagttcaggaaagaatggtaggcttggtggggggagctcccgcaaaaggggaactaatacagaaacactctggtatttgtctgcctctcttgttccagcgccgttttccctatatccggaattcgtccctgcgcattccaatacctgaagcggccacagggtacaggacagggagccctccgacagaaaagagtcgcggcgctaaacaaagcctgatatcactccgcttccataagccggatccccataaactacgctctagctcctcccactgccgttgtgggtaacgcggacgtggaagaacctcgtctgcggaggaaaaggtagatgttaaatggtaactacgcgcgaggttctgaggagccctgggaacaggaaggagaaaagaataccaaaagtgacaacagtttgccaatcgcagtctttaatctgataaagcggttatctcgtcttgagtcccaggtgccgagtcaatccccatacacagccgccgccattgcctcgagtccttgtgtctgactgtctgttcctgctgctgtatgacacagcacctcgaggcaaggaaataagaaaactgcctctgatccaagcagagaaggtcagtgagaaggtgcgcatcgcttgggggtggatgtgggtatcagaggtgaacactggatacgcgacctggtcatgggaggcgggcggtgagaaggagagagagatgggtaattggaatggcacacaacaattaaaaaaaaatgatctaccttttgctagcttgatttccatacactcggttcacctcagaccatgcttgggaagaaaaaggttgcagcttctagcagggaaaaggcagactagatgaggaagagagggctacttccacaggcgaggacagttgtctggggagccctgagagggagagaatgtaaaaagaggttgtaaatgtttgataatcaaggctctg

SEQ ID NO: 70990 - DNA, 691 bp, Homo sapiens
tccaatatgatgttagtttgctaaggtttacgaaagcagggcaaagtggcagttttgcctcccttcacaaatcaaaaattttaacagggatcatcctggtggtgcaaattggagtttgaatgtttgttttgcttaccagcatttttcaagacagatcttgcgtgtgttttagtatgtcgctctagtcgtatacaaaatatcacaaatcacttcatctccccaatcctcatcgaatgttcctcgccagcccagtggtcctccagagcaaagcccggccttccttccagctgtctgggccaggagcttgagggtcttctagcaagcaccccggaggctgtcttctgactgtcatgcagggctgtggcaaactagctgactgcgcagtcacgtggaggggggaggggctgacggtgggtcatgtgaccaggctctgggttgagccggcctagaggagtgttttcttacacccagaaagtacaggaaaggcagacgacaactgtgctccgcagagcgggaggtggggggaacggcggaatattaaggtgggtaggtgtctctccatgcttcatcagcctgaaaactaatttctcaggcgaccggaattacagcatttcttggtagaggaaactatccctcagccaaccgctagcggtcttagacggtctgtcttttgtccaggagctcaagaagc

SEQ ID NO: 70991 - DNA, 1375 bp, Homo sapiens
ctagattccaggcaaacagaccagcagtcagagtatggggtcccatagcgactggccttttttgactcagtaccctaattgtcaaaagttttccaactagagaaagctggatcctcaggctcagaactcccctgactccacctcccttcgcgccccctttcgttccagctccatctttctcctcctgctcctgcccaccatcttcccagcaggccctgctacaagcctctcctaatactgaaatgggagcagtacggaagcaattaacccttctcccgcctctggtctccaacactcccgcccttcagactttcccaggccctctcaacctccagcctctcacctgagacggctggtccagtctctggcctcccctcccccttcagcgtctcttaagcctcctcctcccccgcctcatttccgctgcaggctcggcaccggcctctggcacttaatccggatggggaggggctgctgcgaccccaggatgtgctttggtgtcactcacacttccacccccacccgaagagacctgaagcaattgcacctttacaaaaactgacctgcagggattcaggggattttcctctctcttccctcacctcgatttgtgtcgcgcccaaaaaaccaaatatcctgcagacagatgggagtgtttggtgagcagactagtacctggatcacgggtccctttcatgattctaggccatgttggtgtaaagtttcccatgtcctcatcctcgccctccttttatggcaaccccgccctcctccgtgcccaccgtttttctgcaagcagggagtaggaaaagcaagtttcttccaaacagtttctatgtctctctctcaggacccttaattagctacccttctctctctccacccgccatcccccaccaaacagccccaaatttcctgcacaaaatgggagtttggcggaacagaagtggggaaagcagtgccggccccgcttgctttctgctctcggcctcctcgaccccagggtctccaagtcagcgcccacgtttatactaacctgaaaggatcttgggcacttttctccttctccagcaataaggagctgctacagggaaacaggccctggactataaggacttctgcacacgtcgactcctggtcacgtgagagtcgcgtcatcactgagctcgagtccccagttacccctcccattaacactgcagcccgcccgctgcgttccctccacttgatactgtcaatcttttttcgtatttgccaatcggagacaataaactgttatcttcgccctggagtatttattcgcctttctcagattaccaggaggatcagccttttaggggtaatcgaccatttctccttctttgaggaatcatct

SEQ ID NO: 70992 - DNA, 714 bp, Homo sapiens
tacacatacatacccatatccacaaatattcacatatatcaagatgaagcccttcagtttgctaaagagaaggattatttctttttaagtggcattttggtatctcttatcaggcctcctgccatctggttaagaaataattatttttttaaaaaaattcccaatcggtaattatattatccttgcattataattgcccaaataattattggacttacacagagtctttcttcccttccatgaactctgagtccttttctagatgttatatcattaacctattattttatagaaaaggaaagtgaggcctggccgaggttgcccagctattaaatggaatacttgcctaaggtcaatgtcctttttcctaatcactgctctggaatgattggtatttaacaaatagtaacaataccactgtgctgagtgaattcctattggttcctcaaggctccatgccctttcaagtcccagtcctggtttcacatttatccctgcctgaaacactgcctcaattacccctcacacacttagcctggataactcctattcatccatcccagaatagatattatttctttttaataacagctttattgagatataatttgcataccaaacaattcaccaacctaaattatacaattcaatggtttttagtatattcacacatgtgtgcaaccattaccacaatcaattttagtacctttttgt

SEQ ID NO: 70993 - DNA, 574 bp, Homo sapiens
caggagatttttttctaggtaattcttaattttcataaaagcttttccgtattgctctaaatacagtccccagaatgaaaaacaacctattcgcctcagtactggatacattcattcaacaagtattcagtaatcacctacttggtgcaaggaacactattagtcactgggtacacaaaatagaacacagcaagcatgttttgggccctcatggattttaagaacaagtgggtctagctaaggaaagaatcatactctgctactctttaaatcatgttagaaaccatcgaataacaataaaaataatgtcaacaaaaattgatgatttactaggctatgtagtaaattattgttatgtgtaattctaacaatccttgtttcacagaggaagcacacagaccttgataagtaattgatccaaagttgaacatcaagtaaacagctgactgaatttgaagccagacttgtctgatactactgttcatgctttgaaactgcatcattccagctgatatcattaatatagcaatctgtataaaaagttcttaactgtgagacagaatccaggaatcac

SEQ ID NO: 70994 - DNA, 731 bp, Homo sapiens
attcatcaaggtagatttgtttgggagtataaaaagaaaactccacaattaaaatctacccacacacaaagtcaagagctacaaaactattttattttagtaattcatttttctggagatgatctttagaaaaatgtctcagtgacattttctccctggtttcagtatattaccaatgacttataaaagctgatagtggaaacactggcaaatgtatgctgtgatgactaattttatgtgtcaacttggctgggtcataatgcccagatatttggtcaaacgttattttggatgtttctgtgagggtgtttttggatgaaatttacatttaaattggcagactaagtaaagcagattgccctccccagtgtgggtgggcctcatccagtcagctggagtcctaaatagaataaaaagctgatatcctccaaagaagagggaattctgccagctcactcttcagatttcatctgtaatattggctcttcctggtttatcagtacaccgcctttggactttaacttcaactctttcctgagtctgaagcctgctggactcccccatcaaattttggactcaccaagcgtccaaaatcacatacaccagttccttaaaataaatatctttatatgtatatatataaagatacatatataaagatatatggatatatagatatcttattggttctatttctctggagaaccttgactaatacagacattaagtat

SEQ ID NO: 70995 - DNA, 1038 bp, Homo sapiens
agtgcactattgccttcaaggaagaaatgtatatcaaaggaacaaagtatagagtccagaaatagacccacaaatataaggacaactgatttttgacaacaatgcaaagacaattcagtgcagaaagatcatcctttcaacaacttgtgctggaacaggtagataacaaaaataagcttttatctatacaccacatcataaaaaactcaaagtggatcataaaagaagatttaaatttaaaagctagaactataaattttcaagaagaaaacacaagagaaaattgttgcagtcttggcttcagagaagatttcttagatatgacacaaacagcaacatccaaagcataacaaatttggaactattcatatatacaacaatatggataaatctaaaaataattaggtcaaatatgtaaaataacatgaaatttcaggattcccaaattcatcatgccaagggaaaagttaagcctgggaaatgaattgtgcaacattaccaacctttgtccccagataactgtaatttcacaaccctgtgtcatagcgtaatacataatccagattcccacaacagtaaaaggcattataccttcccagatgaccttcctcaaatattgctcacaaggaaattccttgctagcccctaaatctttcaggatacatatccccctataaaaccagcacatgccaattgtaaccttaagtctgcaacctaagtttaactcctaaaactgagttttgttaaatcttacactgacagtgtcagttacaagcttatctttccagaacaaagacaagatcaatcactcttccacctaccctgaaacgaatacataattgactctttcctctctcttttcaaatcttatcttatgtaaaactcagatttactgaccgctaattagagcctcacaagaatgtaaccatttgcctcactgcctaccctctctccctttttccctcttgcttgctctctgcccttaaatactgagttcccaaacccctctttgtaaagcacaagtcagagatgctcctg

SEQ ID NO: 70996 - DNA, 1693 bp, Homo sapiens
tataaggatataatactgatttatgaaggtgaacagtcaaacgtcagtgcaggatctgaactgcaggggaaataaggggccttggtggctaaggaagggaggaggggagaaagaggtggtactaggggaagtagcacagaggaagaggcaatactacccgagactagatgcggaccgtctctggcaaccaggaaaaggcaaatacaaagagaggtgagtgacaatgcctggtgtgtctcgggtcagagaacactagcaggcactagcaggtggctgcggcagggccgcagatcaaagtggtaactggggatctgagttcggcagtgacgcgcgtccctcacgtgaccaggagcctctatgtgcccaagtccctctcgtcccggtcttttttttgcctgtccaccatctccctattaccctttggtcgagagggaaagcagaagaagtaagttccctctaccctcttaaatcggtgtgagtgtcggcgctgcctagtaacccggggaatggggttgacagaatcgggatggcggagtccaggcctttccctaagctccagccccgccccccgcgcccacatttctgtgcaaaatatggtggtctttggggcggggtggggaggcgagtacctcccccgtcccccgggaggggggtacagacatttggaaatagtttctaaaaatgcttcgcttccacttctcatctgaaaagaaatggcaagctttgcggggtggggaggtgggagcacggaggacgaagcttgacgcaggggctgagacgaaaagagaacccgagagctaggggagcgtgcaggcagtggctggtgcccagaaagtggggggtggggggtgtcagtcagtccgtccctcctccccactccccgccccctaccctgtcttgcgtctgtgtgcaggtctgctggtcacagcggggcacctcgaggagaggacgactaggagcacacggcccggaaaggtccaggtcagggaaggggtacgcagtgggccgggactggggcgcgagggtggacgccgaaaggcatggagtctgcaggccgcactgtcccgcccctgtcactgcgggcgaggcctgtagcaaagcctgctgggaaaatggtgggctttcgggaaggagggggcgaccgggaagcggcggagtcgggagagccggagagcctctgggaaagcgcaaggttgaggacctggcccccgaatcaggaaaaggcaggtattggaacccacggcctgggtgttagtccagccgcttagtattctgactctattctgcctttcttgtctcctaagaataactgtgcttgaagaagaaaattcccaacatggacaaaccacgcaaagaaaatgaagaagagccgcagagcgcgcccaagaccgatgaggagaggcctccggtggagcactctcccgaaaagcagtcccccgaggagcagtcttcggaggagcagtcctcggaggaggagttctttcctgaggagctcttgcctgagctcctgcctgagatgctcctctcggaggagcgccctccgcaggagggtctttccaggaaggacctgtttgaggggcgccctcccatggagcagcctccttgtggagtaggaaaacataagcttgaagaaggaagctttaaagaaaggttggctcgttctcgcccgcaatttagaggggacatacatggc

SEQ ID NO: 70997 - DNA, 2969 bp, Homo sapiens
caatttcatcacacacaaaggacaccaaagctgataaataatgtacaagtgtttctttttcctttcttgtggccacattttcaaatttaatttattgtacatttgtataatttctgacaaatttgttttttaactttccttaaatataatttcaaatggatgaaataaaaaagaaatagtattataaacctacacgaatccatcatccagctttcaacaattaccaactgaaggccatcttgtttcatctataaccccacccactgctcccccccacccccgactttttcaagctcaccggaatatctgacttctgtattttattatagaaaaatttaaacgtataccaaggaaagcagattaatatacgcaacccactgcctatcactcagcaaaaaaatattattaatttagggccaattttgtttcatctatacccctccccatttccccctaccgctgagattattttgaagcaaatcctagtcattaatgtatttagaagccaatcccagacattatttaatccgtaaatattttcgtatgtctctacaaaaaaggacaatttgaaaacataatcacaatactactgtgacgcctaaaaaaactgacatcaattccctaaaaaacatcaaatatcgaatccgtgtcccaattttcccgatgcgtcttaaacatatttttacagttggtgtgttcgattcaggatccaaacaaggcctactcatcgcatgtggttcatctccagctcgctctcgttctccatctctttctttcttgcactccccccccccccaccttttatttaacttttcaatataggaaaattacaatctctgctattttgaggcaattcccaaataacaaattatttcattggtaaaaattggtatatctattttatctttaatttattctaggaaagaagttgatggcagaaagggcactacaattagcgaatttatataatttataatttttctcattctattacgcgtattatttatctccataacaatagctaatatcttcaggggccaggcttcacattacgtgccttatacgcactattatacagtacacgtctctgaggtagatactattattatcaccattttacaaacatggaaaccgagacacagaaagaacaggagccttgcccaagctgggcgttggcgagcaggaatctgaatccagctctgaccgattgtgaaggcactaggtaatcccgtctatacccgacgaaaaaaggaaatcatcgaccctttctccccacccccaccccgaaacctgaaacgagaatccagatcttcccagcagccgacgtgtgatcactgccgttcctccaaccgccatagtaaagccaggtttctctggcaactgatatccataggcagacacgtcaccctggaggagggcgtatgcccttcagccaatcacaatcgtcttgtctaagttttagaatgttccataatcaaatgattggacaaccacccccacgtcagcaatgacacttcgccgcagtaaaggcgggtgctagcaacctgcttcttcactgttaaggtctacagcaaaccaatcctcttcctccgttagtacgagttccggccaatgacgttcgccctcttaggtttttttttttagcccgccctccaaaagcgtgacagccgttgggtcataagtctacagggcagaatgttcacgtggcctatttcacgacccagagttcctctgaccagagggtttttttttttccttttccttttttttttttttcctgcagggaggcattatgggtttgtggtttttttccccccccactgggagaggaagtgtctacgtggcctgcggaaataggataggcggaaatgagctaaggttcccgcgagtggggaagcgcgaggtcaaatctggggccacgcccccagtcctgtggcgcaactccccgaacacggaaaaaaaaggcgcagtgggggttctgctgtgtttgcaagtgagggtcgtgagtgcaacgggcgcaaggcattaaggccagtgtgttagtgcgcgggcaggctcgcgtggtgctggggttgctgtgtgagcggccctcgtggctcgggaggtgctgtgtttgcgcaggcgtgcgcccctggcgtcgggactggtgagagccacggcgggcgcgcgcgcgtgcgtgatggtgggggcggtgcagggaggggtttgctactgcgcgcaggttgttatctatttctgtgttatatttgaaaatgttctaatgaaaaggaaaataaataattaaggaaaggcgacaataacagataaaggggcactgtcagaaatattttggctttccgtactgatttaattactttaaaaatacacttcctacgttttcctccgtgccaaaatcctatcgtaaaccacagccctccaatgattcagagccaaacccttccatcgccgcattagcaactccaaagggaggcttctttcaagttctctagtatcgtcctccctcccctcctccacacctaccccctcccttcaaggttgcgtgcagttctcttggcacaaatacaattttcctgtgagaatatctatctacgacagccttcccctccgttagggactccggatttctgtggcgactgaggcgctcttacctttgcgtcctgatctccaagcaagcacactgaccttcttcaggcaaatacgcactgttaattttccagaaagttctgtgagtaaggtttatacctctcgagtctgccactagatgccgccaaatcccagcaaaggattggctgtttggtccctgggattctgggattttgtttccctcccccctcccctttctgatttgctgaacggtaatatctataggcatcatggatatcgttcattcctaggaaaaaataaaatcaacttctgtaaatagcactagtaggcaggggactgtgacccaagatccaaataattttgct

SEQ ID NO: 70998 - DNA, 1481 bp, Homo sapiens
ctcatccggagcctctagtgcagtacccagcacagagcaggtacttggtattttggtaagggaaatcaatcaacgcatcaatagcagaatctgaaaccagggacctagatctttccaataaaatcatcctgctgagatgtgactcagatgtactggtgcccagcagacaacacgttttcgccctgattttatcctccattcatccgtccgccccctcccccatagaccccgcctgtccccagctaaaaataatgaggggattcacacatctcagtgtcaacacacacaacacagttgacacgccccttaatcctacagctacgccatcaattctcgccgccgggtccgtccgcttgtcagtttcccctactcctcatcccctcgcaacttctgatcccctatcacttccgttcccgtttgcctgctaggctggaagcaggatgtgtctacgccctcagcccataagaagtgctacaaacctccgcctcgctcgctgtcatggcggcgaccgacggcccctttcctgtggcctcagaaagcagcgacagtcgcagtcaccggaccttcgcccatccgccgccctcacttaagcgacgcacaacggagctcccacaatcctctttgcttccgctctctttatttccgcctcccccgcccccgcctcgacattaaccgtttcgcgactacgtcagttggccggtctgtttgggagagccaggcgactaatctggtatagagaccgaaaaacacaggtaaaaagacctaaaagacttagtcatctattggaacatttccccagtttgtttgtaagttggcttgcaagcttatcagtcattctcaaacaggagcttaacttacttaggtgaacagttcatgatgacgcctttaagctgctagaccaacccaaactccgaatttgcagtttctgacctttcaccttgaacctgtgccctttctaccctctattctccatctccttttggttcttgtctgactctttagctgcatatgtaaagagcacagactttgaaacctgagctcccgcgttcgaatccccactgtaccactatctaaacatggcatcttgggcaagtgattcaagcatgctattccttggctttttcatctgtagaattggtataataatagtacttacctccagagttgcagtaaaaatattaaaatttcacatgtgaggagcacctagaacattgcctatcatgaagttaagcagtatattgaaatataaattataatgattgaatttgatctcacctaagacctctggctaataaataataaatgataataatcatttcacctgggatagaggggattgccctgttctctccaggctgaggctgtaatacctgattctagggactgctgatatggaaattactaccactctggctggagtcagaagagtatattaaagagtctctttgtactgtcctaaaataagcaaaatccaacgtttg

SEQ ID NO: 70999 - DNA, 1634 bp, Homo sapiens
gtgccttagtctcctttgggagtcagggaaggcttcactgaggagataacgtttgagctggagtttgaaggattagcaggggagaaatggcagggcattccaagcagggtgcctatgagcaaaaggcgcaaagcacaaaagagtacgacgtgtccagcagctctgagtaggcgagtggctgcagcgtagggttcttggagttaggtgatcaagggtgaggaagggactattttccctgcttggacgatttctcctacacctcattgcacggtgctgggcacacactgcaggagctcaataaatacttgttgaattgggacagaatgaaagagtgcgctgggaaccagggcatctggatgttttctcacgcacccgcagtgtgaccttggccaagtcccttttctgggactgcggttcctgcttagtagtcgagtacgagtgagaaagcggaggaggaggttggccagaggcgcctagcctttctagcggcctgaatccctgattcgatgcgtagagggcggggcgggccgcttggggccgcggcgggcggaggttcagttcctcctccggtccagcagggggcacggggagtggcttcccgccgcccttcccctccttgcgggcgccgggcagactgctgcagtcgcaagcggcgagcgcagtgggcggggcgggcctggccgggccgggcggcggcgctgcgctgacgggctgagtctggcggcggcggaagctgcagaggccaccggggcgctaactgggtggccggtgggccgctgtggcctcgagcagcctcttcgcgcggccccgcaccccggcaagcagcagcgggccgcgacgcccagcctgccagtgagctgcgacgggcacaccccggagcgtcggcgactgcggacaggttagagtgggggcaggggcgggcgcgggagcagcccagggccagagagggagcccgagccaggccatctccaaccatgtccgacgaggcctcggccatcacttcctacgagaagtttctaacccccgaggagcccttcccactcctgggacctcctcgcggggtgggcacctgcccgagcgaggagccgggctgcctggacatcagcgacttcggctgccagctgtcctcctgccatcgcaccgacccgctccaccgcttccacaccaacaggtacgaactgcacctgagggcaggggtggattttccacttctggtcgccccccgctcctgatccttcgtcccgggctgcgcttccagtcgccccctcccccacctgctttcgaccagcgctcattcccggcctccttccctgccccccctccctattttcacccctgccctcctattttcctttcgaccggcgttttactctcttttcctcattcatattctggctatagcgactcctcccttccctaccttctccctcccttgcttcccttccctccccccatctgtaccctacgaatcccaaacccccacccttgatttttagatacgcccctgtttgcatccatctgcaaaagtttaaccccttccatttccggtacgctgtagaggaatttggatggctcaagatcaatccatagatcttttgaaaagtggcgttgaaaggtggaacatttaaagctag

SEQ ID NO: 71000 - DNA, 1518 bp, Homo sapiens
ttaaaaggaggaacctgccatatcacttggtgagaacaagcaagagagagaagggggaagtccaagacttttaaacaacagatcttgtgtgaactaactgagggtgagctagaactcactcatcaccaagggatggctctaagccattcatgagggatctgcctctaagaaagaaatacccccaccaggcctcacctctgacactggggattacatttcaccatgagattttaggggacaaacatcaaaccatatcacatacagtgtggaatgatagaatcaatctaaattacatacctatcaccttaaatacttatcaggtattcctcccgtcttactgcagctttgtaacctttgattgacatctcttcattcccccaatgccccagtctctgataactcctctctgcttctgtgagttccattgttgtagattccacatgtaagtgagagcatgtggtttttgtctttctgccagtgcatttgctcgtaactactgttctactgcattcaaataacaatgcctaacatttactgagtgcctaccttttggctaagcactgggctaagctctttgtatgtattagctcacttgcttaatcctcttaatgatcctgtaaagtaggttttattatgagccgtgattttcagaaaaagagactggggcacagagatgttaaataacttacctgagtcacaccattcaacagtgccagacggaagtaacctttggacacagagcactctggctccagagtctacactgttagtcactctcttatactgccttccagctgtctgctggggcaaggcagaggatgtgtggtgtgttcctttgggtgtgttccttttgggagacagtggggagggagaggtaacaactgcaattcacttcctgccaattgttaccttgtgagaatcaaagctaccagtttttaagagaggccccagatctggatctttatataaaatttccttattttaaatattgggaacacattccaatttttaaaaagcagtatgcccaattaaaaacaatctgtcgataggaagcagtaacttatagttaaggatatttattaagtactacttatgaataccgtgctaattctaggtattattattcagtgtaagcctatagactccccattttatgtattaattctcagcgttgttaaaaagaaacgggcagctgtggtggcccacgcctgtaatcccagcagtttgggaggccgaggcaggcagattgcttgatctcaggagttagagaccagcctgggcaacatagcaaaaccccatctctacaaaaaaaaaatgaagaaattagctgggcatggtggcaggtgcctgtggcccaagctactcaggaggctgaggtaggaagttcacttgagcctgggaaatcaagactgcagtgaactgtgattgcgccactgcactccagcttggatgtcagagtgacaccctgtctccctgtctcaaaaaaaggaaaaaagaaagaaagaaagaaagaaagaa

SEQ ID NO: 71001 - DNA, 706 bp, Homo sapiens
cggggctggagaaccctgagacttaaggatcttataggtggcaggggtggaaaagaagagttctctccggtcctggaaagctctaattgtcagaaaaactaggtggtttgcgtctttaaaagcaagttccagtctgcggggaaccaagcaggtgaactcctgactgaactagatacctgttcagcggctagaactggagactgggagagctggaaaacttttagtggctttccatacctgcactcagttgagcgctcgccccaatcctgtacgccggcctactctggtaaggacgctagacggcgctgccgggacacgctttccttctccggagaaaggtaagagagcgctttttttttttttttaaaccaggggatgggggacttggggttggcagcctttctcaatctgcctcccctccccgcgctcccaaatctaaaggggtgtggaagaggaggaggagcagaagcagctcttttcgtgacgcgccagagcgcttctctctaattcccacctcctccccggtgcaatcagtcagccaggaggctccaaactgttagcgacaaaaacgcagctctcggtcactcccactaccctcccacccgcactccaggcatattttggaggcggcagcagcggtggcaggatgtgaggcgagcctggagctcatttccaggcgcccttccctcttcggaactaagggaga

SEQ ID NO: 71002 - DNA, 1432 bp, Homo sapiens
gcctttaactatgaatgtctttaaatagaagcactcgtattccagttatgttggaaagtagccaaaataaaaatgatgtttaatcctaccactgagaaattgttgggaaatcagtggaattttgttaaacttcaatgaccagtatactctcagtggacaatgaaatgttaagggcctacttagagttggttacatttgctagtgaataaatacctgggagcaaacatttacaaatgagaaggtaagaaacctttaaaaatatacatcctttgcctcctaattgagtgtgtagcattgcaatttaaagactttgataaatatctgagttttagttccttatagttgtacccagttgctaacaggcaggggtctacagcctccaagttcagaattattagctaattgcccgaagaggaatttctcgagaagaaaaatctattcctagaacatgttggtctggcaggcagccatgactgtactaagagattagctgtagccagtacatagtccagtcaaagcttaatcattgtttaataatacttggatatatatgtctttcagttttgattatacattctagctgtaattacaaactttgcatgagattttaagaattgattttctgtctgtaatcattccagtaagacattgaggaatgtgttattatatggaaacaaaagattgtgttgagactttctactggcttctaattcatttatttctgagaattaaatgtatttgctttactttctcattaagtatcaaatctagtcaatgaaatgcatgcttacttttcaaagcaaaaaatgcggattggggggaggtgcttggagtttggctaatgtttgtttcctgagataagaatacttactaattgaaatacctaacaaatagttttgtcttcaattgatagcatattaataaatgtttccaaaagtgagagatttatcacagactataaaatagagtaacactgctgaagtccaaaggatcctggagtgataaagatagggcaatatattgtctttttctcttcttatagattcaggtctatatttaaattacttttgtatgttgtgactctctttcagctgaatttgtgtttaatattttacctattatctctccagctcagcatatcattcatggctgcctttccttgctttacctttgaagtcccattttactttcaatcttggttcaaattgatagttgctgaaataaaatatttagagagattgcttaacagcaaacataacctgttgaaccagattgcattttccttactcggtcatgtcataatgtctggagcagatccgaaaggaaaaaaagaaacgagggtttaaaaagtcatctgtattatggtagcttaattgaagtaaaatccaaactgaaaaaaaataagttgctgtcaatgtattctgtcttatac

SEQ ID NO: 71003 - DNA, 2087 bp, Homo sapiens
acacaggtacctaaaactaatttttaatagggtgggtgggagaaattactcttcctcaagaagtcactcaagaccttctatttagctattttttaacctgaaaaacgtcctcagaatatacatgaactttattatttgggacattaaatcatccccttaactttcttttggcttttgctgctgctgctcctgcatgaaaatgtgagccatgttatgcagttgttggcattcagttcttccagcatggacctctgtatcagagaaagcatcagtctgatgagtgggtatgttaatattcaacccaaattgggtcatcttacagtcagttcatctggaggatgatctagcacaaaaacttctcagtgttgggaggaaaattgcagagctacctgcatatctcaatcagctagaaaatgtagtccccagtggtaagaagaatgtgaagacttgctggcacacagtgggtatttaaagatatattttggatggacttgaaagaaccactcagttccacgtaatgagagaatggctttatttggggctttggtttataaaattatgatattttctgattgttgatgaggaaataacagcttgttttcactaaaatacatttgttttagaatttccagttagataactgaggacgaccataaaggcaaaagtagaggttatatgagcttacatttctggccaaagctagaaagggactcttataccacttccaagtaaaaagaaaataacttcttttgtgaaatttattgttatataattaaaaataaaaggaaccatgctttgaaccctcaaaggaaacaataaaatgttttatttaaaaatgctggttagaagtaatgttgctctgtggatattcacactgtgcttttagctgtagagtgtaagaacactagaagttagaaaatcaacaatgtgatattgagatctcatctcctaaatgtattctaatgagctaagatcaaggaggaaaatacttccctatgatttgttctttaattgaaagggacaatctgagacatggtacttttatctctttaattagggtgacttctctggaggaaaatggatctttgaaggaagggaaagtggtactagaagaattggttaggtcattggaagtgatataggacaatgtttggagtataagacaaagtttacagcaactagataataggcagggatgagagatatcggtcagaaagaatgtgtggccagaattgagctgagtgaaacacagttattgaataagttgaaggggaaataattttacagttcttatcattgaatttgatatggccaaaggcatacttgttgaactgttactgtatgtgcaatattccactagtcctgaggtggggctgacggggagggaaaataaatcaaaactcccttgtttaaaatacttaatatcattgagatcaatgaatggctaagcaaataatggttttagggttagggagggtggagtgtaggtcctgttctctggaatgttccattctctaaaggtagaacatttctggagttttagctggatgcccagatgttaacaagatattccctagcactgctaatcctttaatatcttcttccattatcaactctgtagtggtcgttccgcaatgataagcctttggcagtcttttccagggcatgttcagtccagttctcaatcagggatccatagaggacctccacatagatctcatgggctcccctctgggaagctctctccttttactgggagttccagccattttaaatgccttgaactctgatctctgtagctccagctcaataatactactgggctctgttaggactctaactcaccaagccatagttggggaattgtccccagtcggagagctgggttgattgtggggctcacaccattagtcctccttttctccgagatcacagcttaacacttcctgaatattattgctttacacatttcttccacttttgttgttgcttactgtgggagagttagtctagtttcagttacttcctgttaccttcgataccccatcattctttgggtgctttctgtcataaagaagttgtgctag

SEQ ID NO: 71004 - DNA, 884 bp, Homo sapiens
agcctatttatttcaatgggtgaatatatgtaatagattaagacaattgagaaatggataatgtataaatgcgttactgtaaacaaaatggtttcatgtttgatggctactttcatgtttgattaagttgggccttgggacatacaaccatttcatttctcataggtttaggaaagtttagtgttagcctgataggcaaaatggctgactgactaggaaaaaggcaatggaagatataatttttgagagtattttggaagaattgattcttctgagaactggatgatatttatacttttctgaggcttgctcgctagtgcaagtgctattctaaatggagtgctttgcagattccagacatatgccacattcatgttgtctagatgatgaatgacttattgatagtccaggctttgtactatttgagatggtagttcttttaatagccatgatgtcattgagataaaacttagtgggatagatgttattaatggtcaccattcagccttttatttgcaatgaagccaaagggcagttggagggggatgaggtcagcctgaatcactgattcccttgaagtcttctgtgtgttcccattttgggatcctgtgaaaaaacagaagccaaattgaacaccaccacattttggatgagtttccatttgaggagctccaaaaactcccacaagtcagattcagaagagttttcaggagattgccaaagactgtgcagtattgctggcaggaatagaaacaacaagcagatgttttagcagagtggagcccattctgagagactattcccgggcattcaatgaaagagactggagaggaggttagttcagaacaaagatgagagagcctgacttgggcgtgcacttgcct

SEQ ID NO: 71005 - DNA, 1468 bp, Homo sapiens
gattaattgactttaagatgtcagaaacttgtttatttaaatctttcatgttagtgacttgtatttggaatgcagttacttaactcaggtcttatgcttgactacattcagcttttcagaaacagctgtattaggtcatccagaaaccctgattttttttttaaaggtatcattaagtggtgagaaagaaaagactcattcaaaactttcaatttacctttcaaaccaaagcccagggataattattcataatcatttctaagtctgaaatgtgacattgttccatgagtcatcatctaggttttaaccacacatgcacaaaaaagcacaacataataccacacaggctatttgagaaagcattcagagaaatgttctgcctttttatgttgacttcctgtgtataaatctggaatcataaaagtccaaggacactcttcagtaggagtacattcagtaaacagcatgtgtggagcaacaactgtatgcagaactggagtagaagctggttacaagagaaagaatttttttttttttttgcctttggagatgctatagtagaaatagaatacaatgtttgaaaaatagaatgtttgaaaaatgtatgagaacatgtgtaaagcaatatctaaaaggggacacatgagatataaactgagaattaatgccaaagggctaggagaagtcacaaaagaggactcagacatgagggagtcacaaaactaattttctgacctgggccaatttttccttaaattggcgtggtttaccagaagaagagaacattgtgtttcccttcctggcaagtacttttggttgccgaagactatattatcagatggtgaaaatgttcattctattgatgtggttcctcagtggaaagtcatcacatctttctagaagagccaaaatcttttgtgaatgagctgtgttttatggcaagcttttataaatgattctagaattacagagtttctcatgccagaatatctatttgctctgggctagctagctaaaggactgacctctgccctggactatatagtaaatacctatcttcttaactcacaaatgaaggttcttagactaaagtttggacatgggtccagagaatatgacaggaatcaggattccagggcgatagatgaggcagcaaagtttggagctactgagtcagactcagctggagttggctactactaattcaaatgagctagggatcaagaacatggaatctaaaaggaaggaatggggtaagggaatggcaatctggaccagaatgggccagaagccaaggccaatatacagtgggaaaatggttattcaaactgggggaagctaggtcagtatagcaaaggtgaagccaaggctaaggacaacagtccagattcttcctagcaaagtgtctcacagaaatagagagcctgaatccttgagtatacaattaacagcacaggttttgaaatca

SEQ ID NO: 71006 - DNA, 755 bp, Homo sapiens
aggtcatcgtcattgtgaggattaaatgagacaatgtgtgtatagtatttgtcacatgttaggtgctcaacaaatgctagtccctctcattcccattattgtttacattatgctgacaattttatcctcattctgtaatataaatagtatgtccctatcctgtgaaatattaatgaagaaatttctgaatgctattcctttttattttttgtttttaaaaacagttattagctgtttgtttctatcagcagattctagacccagaataaaatcatatttacacttgggcgtttctatgagctctctttagcctttctctcctggtatgaacgttatggaagtaaagtagcttctttttccctcaaaggggactgccaaggccaaaaggaaattgaactttgtcttcctagtcacctctgatctttgacataacagagactgaggaggtgaaagctaattcttaccaagtactttttgacacagtagattgagcaataatggaaaaagttctgagatgttgtttttcacaaaattaccactgttaacctccaaattacatcaaccgaaacaattttttgttctttgaactctgacacagattgaacgagccctcatcaagagtaagaaaaaaaatttctctaggttagtaggaattggcctattttgaattctattccagccagtaaacatgctgttaactttgaaaattctgtgtagatttaaaaagaaatactctaatagctaggtattttatt

SEQ ID NO: 71007 - DNA, 695 bp, Homo sapiens
ggagaggcgccgccaccccccactggagggttgtcccagtagcccgagagcagcccctagacccctgcgaaggtaagtgtttacgactgccttggagagcctggctgtgggcttgcccaacccagccctgcccagttttgccccctccagccaccttggtggtagagtgtggagcaggacccctgggagccccataccctgcccatttcaggaacaccctagtacttcccccatcaacaaaggccaagtaaaaagtccactgccatcagcgcaaatgctgtcctcggcaatcgccatctactggctgggacagcaaactgcatgacccatcacaactgcaaatatcactgtacagtgctcagctggttcttgcctgctatcgccacctactggccactagggtgaactgcgtaatctaatgtaatcgctgctgaaagaagcacacagtgctgggaaatgagataagcttcccaaggcctccacctctccatctctgttggtgtggcacagcacaccactacaacaacctacaaacaactagcatcttagaaaaccactacagtaaggctatctataatcaatgaattaatacagagtgttggtgccctaaaagcacaaagaagcaaagccgaaggactctacccaacatacacaacagtaacacactcaagcggggaagaaaaaaatcccaccga

SEQ ID NO: 71008 - DNA, 314 bp, Homo sapiens
aatgtaaatcatcacattaatggaaagtaataaaattatatcaccatctcaatatatacagtaaaaacatttgctaaaaaccagtgcctgttcatgaaacaaaccaaagcaaacacacagttattaacaaagtaggaatagaagcaactgataaattgtgtctacaaaataatctgttgcaatcatcatgttcaatggtgaaatgttaggtaaattcctcttgaaaatcaagaacaggagaaaattgcataacattatcattcctactcaacagtgtaccagaggtcctaatcagtgcagtaagacaagaataa

SEQ ID NO: 71009 - DNA, 1170 bp, Homo sapiens
gtctgtctagtggtctatctatttgttgatctttaaaaaaaaccagctgctggatccattgatttttggaaagatttttgtgtctatctccttcagttctgctctgatcttagttatttaaggattgtaggacaaatgcttgtctatcacaagaaaacatttttattaactgaaaattaactgtagctttaataaatttgaactcggagattttaaaaaaatacttatgcaagtgagtcagattttgtttttaaggggaaggagtgattgtccctcaaaggaaaattattgaccacttctatcacacttttatgtttctgaattgttctttgagagagaatagcttttaaaaacatcaaaaactctagatcttaacaatctaaggacccaaaacctttcagtgtacaattatagtattattgaaaaatagagaagaatgcaaagaggttgcataattgagtataataaagagtaacataatagagagtggagagggagtaagagctgagtatgagcaaaatagaactagtaggtgagaggccatgggcaagtagaaacatgtctagcaataaaagtaaaaagaagaaaaaaccataaaatagaaaacaaaggtaagaggaagactgtttacggtaggaagtttggaaaaaagtgactaagagcaaaaacattgctgacaccagtgcattgcacatgttccagcaaatagtggactgcaattaacaaagctgattctcacctgttcttaggtaagctactgaatgcaacacaaagggttactaagagaggcctcttgaccaaaagtggttccccccactacgtgtgcctggaattcccacaattagactctttctttgagttaaggcttggcattttcagaagtcatctcttaaagggcaatttaaatagactggaagggttaaaatacatagagctttaatatctgctatgaactcttcatagattggtctttcagaatacttttaaatgtgccagctacccaagaggagcaaagcactgcatgatctgaactgtctagcctcatctcttcctaatccctaccttcttattacactctagccatgaatgaacacatcatggttatttgttatcctgtgactttttatgtgcattccttcgctcagtatgccttcctcctacctttctatc

SEQ ID NO: 71010 - DNA, 436 bp, Homo sapiens
ggattacaggtgtgggccaccgtgcctgaccgcacatcagccgttaatgttcaacacatgaatttggggggacatgttaagacaataacattcggccctgaccctcttacaagtaaaatacatacattctatcctaatagccccaaaactcataactcattctagcgcaaacttgtctaaagtccatagtctcatctaaatcagataagggagagaatcaaggtatgattcatactcaggcaaattcccctccagctgagaacctgtaatatcaaacaagttttgtgcttccaatgtacagtgttgtgacgtgcatgggatagacattccaattccaaatgggagaaataagcaagaagaaagaggttgcaggactcaactaagtccaaaacccaatacagcaaacaaaattatatcttaaggattgagattaaac

SEQ ID NO: 71011 - DNA, 877 bp, Homo sapiens
ctgttggtttctgttgattgtcttttccaaatagattactgatttccctagtccttgatatgacaggctttttattgcttcctcgtcatgttgattgtgttttgtgactcctatttatatcttttatgtgagcaggcagtcatcatgcctaggtttagcatgcagatgctagccaacttttgtggtctgtgattataatgacagcttaatttttagagactttgcagtattagtatgatcttagtttatctggtgctgctgcagctcccactgctacttgtcagtggagtggaagaggtttccctaggcctgggtgcctggtgttgatgggtggggcaagggattctcaggccgtgaaggtaaacgggcttccctggcaaggaggttgctgtggcattcttttccctgactgtggaagataaagagcacttctttggctaggctcttgtcattgtggttattcatttactggtgccctagtctctctgggtgggaaaggggaatctcaggactatagaggtacagagacttttagcctgaatggttctgatgttgaaatccctcttcctggtgccacacaggcaaccagtgtctctggataaggaaggagtgtctcgtgcccatggagaaaaagaagcttcccaggctgggttgattattggagtggagcccccttgcttgtgttgctaggcttccctggttatctcccagtgcaggattgaagtctctggcgtatcagggaaagagagttatctctactttctgtttcacagccttttccaataccgtgggaggcaagcacagcctgaatatatggctgatttaacactacctgtgagtaatgctcaatcagtgggggacagaaactaaccaagaa

SEQ ID NO: 71012 - DNA, 1136 bp, Homo sapiens
ccttcctccactcttcacttaatatctgcttttcttttcaccagtatctcagtagtggttcattgctcagtggtatacccaaactttaattattggcagatctgatcccttgaatgtcctgattgagaagagtttcattgatttacattctgatgccaactccttaatctacgtcacactccagaatgtttctttagcattatacccatttcatactactcaggcattaagtaatttgtcagagttcccatagccagtaagtggtagaaccaaggtatgaactcaggtacctttgactccaaaactcacgcttgtgatgctagtcttgctccttgaaaacataggaagagactgagacagaagtcaggaaataggtggagcaacatcacagatagttgttcctatggtaggcccacagtcagcaaagagaaggcctgttgtttaggtattagcaaaatggaaagcagataagacagttgccacaactgggtggggggaggaggatgcatgctcagacaagcccttgcaaaatctcaccttgcaaagttaatcatttgcagggacataagacaaacaagtgataggggtagcaaaaatcaacttagacctcttgtgggggcgtttcatctaggttctgggaagtgaggtgcatcaaacagaaagagtaacccttgtttctccagcctgcagaaaggaacaattatagctgaactgctgtactttctttctgccctgctttattattctccatagtacttatcaccttgtaacatctggtatattctacttatttagtttactgtctatctcccctcacttaatatgtaggctccatgaggatttttgttttgttttacaggaacacaccctggcatatggtaggccctccattgatgtttattggatgtgaataaatgaatgtgtcatcaagaggatttgcgatgccccgctcgtcatggagatgttaggactctaatatccagtttcaactttccaactggcttcttggaaacttgtggctccttcttaaaaactggtaaaactttctgcttttgtttattgtttactatttaccttgtaggcggtttcctgctgcagcaggatgtaacttcagaaagaggccagtgcattcacag

SEQ ID NO: 71013 - DNA, 593 bp, Homo sapiens
acaccatctcctatatcctccataccaaccccctttgttcaccactctatccaatctccatatcatcatcagagtcctctttctttaaaagtcactgaggctggtagaaagtcaattattagatgaccacacttagaccttcacccctagagccaggaatttggtttgggactctgacttgccaacttggttatttgggactctgacttgctgatagagatgttcaaagtttccaaagagaaaaaaagtacttacagcaaatgcccaagaatccacctgcatctctcagaaagcaacatctttccatttttatagcatgtcctgtattgcaaaactagagcactcttagttataaattaaccccagcattaaccctgggatggtattttcaaagctgatgtacaaaaccaaggccaagaggaacaaagcaaaaaatgataaggtttgaactttgagtgattgctttggctgccagacccttcatgtaaaacaaaagagaaagaggattgtcagagctggaggggtttaagtccatgctggcaagagtgtcttcagcaggcagaataggggccataggcaaaagcaccaagagg

SEQ ID NO: 71014 - DNA, 752 bp, Homo sapiens
accaggagaaatatttgttaggcaagtggtgaatagcctaaatacaatcctatgtcatcctatttcaaaccttgactaaagagaaggcatgaattcttaacacagttatccagggaataattgcttaaaccccatgtacatgggaaaaattgattgctccaaagtcaaattagaagattcattctgaaggcctgagagactaatcagtaacttctctccaataaataaacaatgagattgtgaaagaaaatgaagtaagtaaggctaaatctttctaaagaggggtcaagaaatccttttgagaggaatgcacactcacacctgctaaaggtcaaccacggaatgttccaatagacttggataagcaacagaagtcagtattaggcttttgacatctctcagctgggagtactctaattaattaactagtcgaaaggggctaatttaggatataggatttctgactagccaatgaactgcctccaaaaaaaactttttgtggaaatcccctgttaaaaaaaaatcttctcctgtccttgccttatgtgatactattattattcagggcttccctgattccaagtatctgagttacacttctttgtctccaaaataaatgctatttattttcacctccgtgtcagtcttttttttttctttaaagttaacatagctaatgtcagaagtggaactcaaaatgatcttatgttggagtagattggcattttctggaacagagctccttgtgctct

SEQ ID NO: 71015 - DNA, 1981 bp, Homo sapiens
ataagctaatacacaagacctttaatcttttcagttcaattatatgaattattaggctgttactaggtgtatgatgctagtagtaccaggtactatgggagggtacgctaatgagtaattggcagctatgatatgatagcaaggttcatatttgtattatacatctgctgggatttattcagcaggttctgctgctgattccctgaactccttccctctgctgagtggtgtgaactgttaattctcacctgcagggtccactccaacactgatatttcagatgtttaaaagcggacaagaagtagggagaagaaacagcttcattgaccacctccatcaacaacgtctcctatttttttattttcggttgtcctgtccccttgactctagtaaaccttcctgattccagattacctgacttggaccttggactaccattgtccctaccttccttttgacctggtagctttttgcttccctggaagcctgatgcctgtttgtctagtttgctgactcttggcccagtcagactcctgatatctctgtttgtcttgttcgttcatctattccttcatcagcccttggcacacattgcaatctccccatcccagcaattttcacagaccagttgaccccgtagcgtatgtgtcctaatgctcttagtgtccagtgtgctcctgaataaaaacagagcttgaactaaaggaagcaatgaaacaaataaagttgtctatacatctgggagaactaaaaatttaaaaatgtaaatgttaaaaattaaaccttcaacaaccttttttagagtataacacatggggcacaaaaattaatggaatgcagcaacttgcaggtatcaatcaatcaacaaatatttgagtgcctgccatgggcaaggcactatacttgaaaggaaaggaattctagctactgaaatatgtttgttttccaacgaataaacaaggtaacagaggatatcccttggggagcctgctaagaaaacacacacacacacacacacacacacacacacacacacagagagagagagagagagagagagagaaattagaagagaaaaaagcaataaaattcattctactaatgccatagcaattaaactcatggatcttaacttactccaggctgaactggttgatagcatatttcagcagggcttggcaaaccagtttagtgttttagatattctgagagaggtaactttcagccttgtcacgtgggattccccagagtccagttcctctttccaatccactccatgtttatgaaagtgcattagttggaacagtaagaagaaaaaaaaatgtactgcaggaagtcatccaatcctaataagttgacatgtagaataaagttgatggtgttatttattactaaggtagtcctggttaagggttacctgtgtgtacagctggaggaggggcaagcaaaggggaatgtagataactaaagtgaaatagagctgatgtatccagaggttatgttgctagaggtgagatcagttacctacgtgcaactgaaatttcaaacttctgttcagcagggacgtgagtggacaatggtgactgatagttggaaatatcagcaaacatcttaaattttatactcaaatgaatgagcaatgaaccaggagaataggtccagttttttttggctccttgtaatttttacctttttacttaaaattacagcatctttttcaatgagtgcctatgtgactgtgacttattacaatgaaaccagcaactacactgcaatagagacatgtgaatgtggcgtttatggattagcttcaccagtggctaatgctatgggagtggtaggcatccctaagaacaataactaccaagcttgtgaccacaacactgagtttagtaatactaagaagccctggattgcgctgatagaaagaggtaattgtacattttcagaaaaaattcaaacagcgggcagaagaaatgct

SEQ ID NO: 71016 - DNA, 1161 bp, Homo sapiens
taaaagagagcttttagcaggtatcagattcaataatttcatgaatgcattttctagcaagtatctgtagtgcagatattttatgtccttggtatgctttggatatatttagatgtagtttgttgccttgttttaggagtccaagttgtatacctacctggacagagagctgtctactacagttcaggcagggcaacagaattacctgcaggctaaactactcttctcctcataaaagagattgaataaaaagcctacaatgacagtccactgcccagtgaatcaagaccaactccaaaatatgttattcaaggtcaacaaagccctaacctaccttttctgcccaatctcccactactcctcctctgtactctagccaaatgaaaatactgtttcccaaatctgctctgctctgtcctgactctgagcttttgttactgctatatcctctactgaaataccttccctcaccatttgtgtccatcaaaaatcccacctatccctcaaggtcctgcagttatccatgaaacagcccctacttccttgagtcagaggcaaacattcctgcctctattctagcacaggactttgtactccctcacagcacttatctctctgaccactcttttgtttaaataccacaccaacgcaataacatggatgaatctcaactgcattttgctaagtgaaagaagtcagacacaaaaagctacatgtatatgacaatccagaaaaggcaaaaaccatagggaaagaaaacaactgagtagttaccagggattaaaagtgggaaggggttttgactataaaggcatagcatgagggagtttttgtggtaatgaaaccattctatatcttgactgtgatggtagtggttaaatgactgtatatatttgtaaaaacttatataaccatatactaaaaagggtgaattttactctatgtaaattatacctcaacaaaaacgttaggaaaaaatcataccagctaggcagcaaactagatagcctgccctcaaattcttgccaatcatttacttgcacttcaagtgatgtgccagagcaagatctgtggctacaaaaaagatacatggtcccttctctcaagaaactgtctctaatgaaggagataggcatgtaagtaaataaatgcaatatagta

SEQ ID NO: 71017 - DNA, 686 bp, Homo sapiens
aaaaaatgtacctccccccaccccccagctaattggaagattgtcagctaagggagatgtgattttatagatgccagggtgtgctctgattcaatgcatctgggcttttttttccttttgatgttcccgttagtattttccccattaaagttcttgtactttatactgcatgatttgtggtgaagtcaaaaccgaagtcatttttgtagctataaaataccttattgttgaaggcctgcttgttccttgcctgtttcctgctaccaacataaccgtaacacttgtctaattctggtgtgacagaacttaattattctgtgaatcatgagtggcaaggcagccaatttcagttgtcccaactacgtgctagcacctggtcacttattgccagatacttgtttactccgagttattgatcaagtttgagtcctgtgcagctgccactaatcctaatgcatatagttggcagctgtgaatttgtgactttgcccccttggaatacaaaggcagcctttgcccacactcatgaaggctttaacttctaaagggtaagtcttagcttaataggtgattgtgattacatactacagtagaaggacgtttattcataaattattttttcaggagccccagccttattagaaattatccagttaggtttctatcagaaaagaatcccattgcct

SEQ ID NO: 71018 - DNA, 1920 bp, Homo sapiens
aggtcatgaatagcgcaggaacatccgctagggtaagtcaggtttgtgaaaaatgcagaagaaaggcttggttctgaggtgtgtgaaaacagtcattcttttgtgaggactaaaattagttttagaagaggcatctgatgcggtacatgaaacctagggtaacggtgaggaaatacacatgtatgaggcttcttaggagcagggaaagagaaaggtgccatttgaagtcagtaagaaagggtaacagcgcgcttttcctgcccttcccccctctagagaatcagtaaatagcctgattctactcaaattccttccctacccaaattcccttgactacaactcagaccctttggatctgcgctttttagaagtactgtacttcacattctggcaccgtaagcccgaaatgtcctttaggcaaatgttaggagggaaaaatgtattcttgcaattcaaaaccgactcgaatcctgccagaaagctttatgtttgcggactttatcgttcctcgcctgtccgttttttataaaacgacgcgacacacctagccacacagcctcagatcctattctaacatcgatccatcctgttacccttttaagaggcggatcccgcagtgtcctttcctccctcccagccacctctacccccagtcggctgggcggagcttcacgctaaagccccagagcccgacgcggcagccgcggtagcggagaagactggagctccgaggagctgcatctgcggcaacctgtgtgctgacgctacgtgcctcctggctccgacgtagctcgcagctccccagtctcactccattccttccccacctggcgcgcacctgctcaagaccagggtcctgccaagcgctaggagggcgcgtgccaggggcgctagggaactgcggagcgcgcgcgccatggggccgccgcctggggccggggtctcctgccgcggtggctgcggcttttccagattgctggcatggtgcttcctgctggccctgagtccgcaggcacccggttcccggggggctgaagcagtgtggaccgcgtacctcaacgtgtcctggcgggttccgcacacgggagtgaaccgtacggtgtgggagctgagcgaggagggcgtgtacggccaggactcgccgctggagcctgtggctggggtcctggtaccgcccgacgggcccggggcgcttaacgcctgtaacccgcacacgaatttcacggtgcccacggtttggggaagcaccgtgcaagtctcttggttggccctcatccaacgcggcgggggctgcaccttcgcagacaagatccatctggcttatgagagaggggcgtctggagccgtcatctttaacttccccgggacccgcaatgaggtcatccccatgtctcacccgggtgagtgcagctactagattgcacccctccagacctctgccatggccagtttctcttattttcctcattgccctcctcgtcctatccccttgctccgaaggaaagtgggtgctctttctgtccccacggagtggggcagggtcctccccgagattcaccaggcctgggtgttgggcaaaaaaaaatccttcatttgcctctctggtggaaaagggtaaaacaaaccgggtgcagaggctggcaaatcaaggactgtttgagctctttgcgttcccttttcctggtttttcacaagggtgtctagccttggattaagtggtggtgggcatcgggtcttaaatgaccgaggagatcacctggaaatctcttcctcactctgctttttaacaacctcagactggcagcagattttcccctcctctccctgtttttctctccatgtttcctgggtatcaaatactagattgtgctactgtgccctgttaacctcattgcaattttggtggaaactttgcttagt

SEQ ID NO: 71019 - DNA, 1530 bp, Homo sapiens
tataaagacaccagtgaactaggtagaatatctttgctttcaccataatttcaaaattgaacattgtaataaagaatgatcattggtttgacattttatcatcaaccccaatatattcccattcagaatcaagaaaaaaaaccatgtagtggagattcttcactaactagagcgaatgcagcttttgattagtcagaatagtcacattaagcttctgttaagaaaattggccaacaaccagcttctttgaatcagtcttcagttctactgccaaatattcttagaccaggtatctcttaggattagagaggaggaggggaaaggcaaaaggcgtttgacatcatatacttgctttttaaaattccccaaatcacagtaaatagccagtttgggaagaattttaagattggataattgctggctttaaaggggtttttaaatttccttcgtttgtcttcttcacaagaaatgtgaagcctcttaaaggcttctttgccattacacaatggaggcagtgtacaatagtggagagatcatgggctttaaagccagatagaacctgggcttgaattgaatcacagctctgaagcttaccagctgtctggactttagtcaagcttctgaaccttacttttcttgtctataaaacttggatattaaaatagctatttcacaatgttgttaatgattaaacaagatgacacatgtaaaaagcttacaacctgacacatggtaaaggttcaattaatttgtaaacctttctttccccaaacttaatggagtagagacttttaataattgaaatgagaagtgtcttgcatgagaaaatcaagaaagtctgtttatattttctaaattcagaaaataatttttgagcaaactctagccactggggaatttttttctaagtgactaaggcccagtcctccagctactcaagagagaaaggcacattaataatacaattactgaacaagataagaggtggaaataatgtgttactggaatttatagactaaggaaattctgatctggtagcaaggcattggaaaagtatctcatgtaatttgtataatgtagatatgttcttgaaattctgttttttaaggagtaaggtacaaattacagttcacatggggcatattgtctttaaatgttgaggtatatttgggcactgtaaagttgacataatgttgttcaaacacgtgttgaatataatctactgggccctaatggtgttctcatatttcagtttttttaagagggaggcttgcatcttggaactcttgctatcagtgtcacagtgaaatatcttgagtactatcttgaatatcgtgaggcagtttttttgtgagtgactttcctttaagctctaaaaatagtttgtgctttttattaaatcacttgtcttgcatccatatttaaagaaaatagcttttctttatatcagcccagtaggagctattgaaaatactcaaattttcttttaaacacatttttattctaaggctgctttgttaaacattagtt

SEQ ID NO: 71020 - DNA, 1140 bp, Homo sapiens
tttggatttagagaaggaatcgtatcactgactgtgtgaccttggataagtcgcctcacccgacagtgctttcctttattaatgtgcaaagcggggacgaatgtccacttcgcaagactgctgtgaggattacgtgagatcgcctgagtctatagtgagagctcattaaatgttagttgttgctactgctacttcctggaatgaaccgatattccaaaattccagaaactttgttttctacagtttaatgccttcggctgtaaaatgataaaaagaagcaacacctttacacctgggactcacttatttgaaccaaaaaaatgctttaaacttcagataggcaaaacacacttaactgatggctgggacccgctttgaaagcacccccacccattctcaccccagtgtattgtgggaagggtagtcccatgttccagtcgcttgagcacagaaaagcgcgtaggaaactacaactcccaagaggtaaagaagcgggactatttcccagtctggcggtagcgctgtgggagggaattggcaatctctctgcctacgtgggagagaagggagggttgggggaagtgtggaaaacctgaacctgagctgctgtcgcctgaggaagatttggtgggaggagaagcagaggggaagagacgggttgagagtgaggtgaggagggcatctaggtcactgctcccggggggcacaaagttcgcgatgtggctgaagcctgaggaagtgcttctgaaaaatgcgctgaagctgtggctgatggaaaggtccaacgactacttcgtgctgcagcggcgtcggggctacggggaggaaggcggaggggggctcacaggtaagctgtggccaccctacctgcctctgggctgtgttcgctgttacttaaaaggtggtgaggacaacagttactcgtcgctaccagtttcccgatcctaaatcgtgggcggagggactggggttcttctcccgacaccacctttccgccaccacctccaagtcctgagaatgtctcactggacgacgagttgctctttggttgggacaggtgaagggaggagcgcggttctttctgaggccaaggaagaaacgggtacctaccttgtcgcttcccatggggggagggaggct

SEQ ID NO: 71021 - DNA, 628 bp, Homo sapiens
actattattatgactactaccatttattgagggtttgtactatgtgccagggggcatgctaagtactttacatatatcatttaatcctcacaataactctgaaaggaagtattattagccccattttacagacgaggagactgagactcagagtggataagtaactggcccaaggtcatactgctagcacatggtagattccactttacttacaaacagaaacagaatggactaaaagaattaatgcagtcaaaggtcaactgcctggaagccttaattaaagaacaaggttaaattttgaccaatagatggcaccagtgtgtgagtttggtggcttactcaaggttgtgtccaatgcagggaagtcccagctagggcttagaactgaagcagcctgtctcatgctgagggagaaggaaaagaaagatggtcatcgttttgctcctgaatgaaatgacattacccttttccctttgtagctaaaccaggaagccagcaagttgggggaacaatggtggttccaccaagagctactttcagaagatttgagaatcttttctctttcaacatttcctgagcacctcctttgtgccaggcagtgttctgtgcaatgaagtcatatgggaat

SEQ ID NO: 71022 - DNA, 1121 bp, Homo sapiens
aattctccagccctatggccccatctccttccactgaggattatttcactgacccatccatgggggatcattcttgggcatcgttaacaatgcctctagaaaagacagccttggcaaagtcccttaacctctctgggctccagttttctctcctatgaaacagcgatcatagatagcaattcctcccctctcctgcttcacaagacctttgtgaagattcaaagagctaatggatctatgtcaagtttggagcttcatgccagaagcttacctgacagggtgatggaacttggattcagccttggtgacctcagcagccgttgccccaccagcagcctgtccaaagcaaaagctagcatgtggctcaaagtacatggctagataacttcctcctctgtactagaggtcagaaagctgcaggtaaaatgatcttgaagagaccttagacatctctgggacccagcaacccccaatacccacccctcaacaaggggtctctcttggttctggttgaaaaacaagcagacagagtcctgcgggttgtttgcttccctgcctctgttccagcacctgtttggaggctctccaggggacagtgttctactggagcagcaaagattcagggagatcgggtgggtgggagagcactggagtaaggtgccaggagacgaggcctcaagcaccagcactgccacacactggctgtggggcctgcccagatcccttgcccactctgagctttggtctcctcatctttccaattgccacagaaagcttggatctgctctctgttggaatcaaatgttggcaaaactgtgaggatgctatctcagatctgcacctttggactgaggtcaggggctctctgggaagtgacctggtcactgttaatgcatgtggctgcatgtgaacacacgtcacaagggctcgaactcaccaaatccaccagcttcctcatctgccttggggagtcatttgtggaagacagccagggcctccagagacaagttcctctgggacaaagaggagagatcaatccgtagaggaagagactgaaaggtgggctccctgagataacaagagacctcccaaaagcttggctcaggtgccatctgctccag

SEQ ID NO: 71023 - DNA, 1324 bp, Homo sapiens
caaagcattgactcagatacctgcctcatgcaaagccctatattctagagcagtttccctttcctctgtggcagactcttgtcccccctaacagatggcccagggaatttcagggccccctctcagtcctggaacccttgttccagagtgctccctcatcatccaagaggctgatgatgggagcatctattaggagactggacaggaaatgtctgggcatgttatacatgcaggaggccttagactaggctgcagagggggatttgggcatggctgggaggatctgaactctcagagtatggacagaaggctttgctgcccacccccatctaccctggagtagattttcaccatgggcagaatgatccagggctaggccactactctctaggcccctggagattcaagaggcctctaacaaactggagtccaagactacattctaggatctgttcctcctgatgtagtctgcagtttggcctcagtctgcaattgaggggccctatggcactgttgcttggcaatgtattaaacagcaggccttggagactagcacttgagttaacacagccaccacaaccaccactgccatcatcaccttcccggaaagcagccacctgtctggctcctggctttgtccagctgccaacctaaggcatgtgcctacgcaggaggcgatgacattttggctccacgttcaaagttgttttttttttcctttctcatgtgttatttctaaagataacaaaggtcaaaaggcatccagcgttttctggtttctcataagcttctggtcaatatttaatctggtttatggattttttttaggtcttctagatgccttcttgaggctgcttgtggccacccacagacacttgtaaggaggagagaagtcagcctggcagagagactctgaaatgagggattagaggtgttcaaggagcaagagcttcagcctgaagacaagggagcagtccctgaagacgcttctactgagaggtctgccatggcctctcttggcctccaacttgtgggctacatcctaggccttctggggcttttgggcacactggttgccatgctgctccccagctggaaaacaagttcttatgtcggtgccagcattgtgacagcagttggcttctccaagggcctctggatggaatgtgccacacacagcacaggcatcacccagtgtgacatctatagcacccttctgggcctgcccgctgacatccaggctgcccaggccatgatggtgacatccagtgcaatctcctccctggcctgcattatctctgtggtgggcatgagatgcacagtc

SEQ ID NO: 71024 - DNA, 1108 bp, Homo sapiens
atctggctgctaaagcacttgcagatccactgatttcactgcattctccacatactccagtgaagtgggtcttttacaagagacaaaatggaggcccagagatgtgagtaatatcactcaggtcacagtgtcagagtttgaacataagcttagaaacttctcacagcaacgtgagcccagcattctggtctcagaaggtgtatgaggacgtattgctcttcagactcttgcaggcttcgtgtccctgtctgccactggaatacaagggcctttgttggatatagagcacagagcttcccttcatcttagaaggaggctggcctgaggggtcctcctacctttgttaatctgggaagtttcagtggaaggagtcagaagttcatcctcaactagaaaagccagggaagacctaacaaagagcaactgttccctccagctggttgagcaagaaaggctttgctctaagtagtttcctagaaatattcccggctcctgggtccagggcaaacacttttcagctcaccccattgccttccctcataaagtaatttagattagccacagagctaggggatagtgaaggccactatgtttatgctccagccccatggctctgacccttgcacaaggagagatgtttctgtcctctctcattcctctgatagtaacatgactcatattttcttccccttggagccctagtgacccactgctatgtgatcattaatgggcgaagaaggactgaaactggcttcttagtggaaaggcaagctccaactttcggaaagacctttgtccagccattcaaacagctatctgctggccagcccacactcactgaactcttactctgtgtcaggaaatgtgcaaagggctttgagggcgatgagagtgaacaaggtaaagtttgtaccctgtaggaactgacagctcatctagaggagataagacatggacacctaactgtggtacgaggcagcatatgggctgtcctgtgaaagacgtgacaaaagtgatataagataggggtcaagggctgataaaaatagtcttgtaagtccccttaaattccaatccatatgaaatgagggcctggcactacatgagc

SEQ ID NO: 71025 - DNA, 986 bp, Homo sapiens
aattgagcaatcgggtgtagaggcggtgctaaggaggtagcagagatatgctgtgcagctaatctggaatccttctgagtttgcctcacaggacccttatgtgactctaaaagaaggagtgaccctggggctcagcttctgctccctcatctccttcccttgcacaagactttggaatttgctgggggcagcacaatcagtgcccattcaggtagccaggggccttttgtctctggaccagaggagaaatgcaggtgtgggagaagggagacaggcaagagaagagcctagtgctaaaggaaggtgatgaggccttgcagggccaactctgttccctcccactcagccctgggcccacggacaggggattctttcgtgcctgcagcagcccactctgggacacagaggcccaggccaggaagtgcatgtgcttctcctcagctggctgaagcctggctttcacccagactggtctccctgctcaagcggctcccggctttgatgagaaattctgttatctcaagagggaaaagaacctcaaacaggaagtctagcaggttatctctctcttctgccctaagtggtggctcactatatgctgtgatgtgatcactgataaaatattaacaggctgttatcaggcacagtaatgcagaggctataatctgaccacttcctcccaccccacagcccaccactttcctgggaattgcagctcaggaatttcttaactctcacctaaaattccctgctctgggcttcatcacccccaaagacaagcagcagtcttagagcttgataaagcaggaagccaccatgcaagggcacatcatcaggtccattttaggagagagctgctgctttcccgtcctctctgaagtcctattcctccagaatggcagcctcaccacttcacaggtcacctcctcaggagttttgaagaagtttccatctgaaaattctcatgaccttgtggagataacact

SEQ ID NO: 71026 - DNA, 1200 bp, Homo sapiens
ttcaaatactcctgatatctaagaaaaagaacagttatgcttcttcttgttatgaagacacaaaataacactgatgaggtgctagaaggtgaacaagtaaagtccaatgctaaacttatactaataatttattctaggaaacaacaaatgataaagcttacctaatggcacaaatatctaatagttatttttacatgtggtcaacatgtgctaggcctatgaggcccaagagaacttcaatatccatatactgaagaaaaggaacaatgcttatcattataacattaccttatttgtgtagtattttacacttttcaaattttgtctattatttcacttgcacaattcccaatataatgtgaatacatgatacataaaaagagtatcagcaaatgatcacctcaaaattatagacctgatacagcagttataatactgaaaaattggaggtacatgcaacacacaattctatcaacttaaaattgtgtttctacttctgaattccatgctaggccttagaaaaaacagaaacaaggtaaaacataccaacttactctacaggaaaacagactctaaagcttactattgacaagagatcatgctttttagtcacctggaaaactgtaaaacactggaatccagaggcttaagttgaagagatggtgatctgctttcttctccaccagaaggaagcacactagggctatgaattccctcatatccaattgtcttgttattcaatccagccatttcttgaacagtaaggatctttggtggattactgaatacctataaaagacagaaatgatttgtaaaagtctcaaattcaaaccaaatgccaaaggatgagtcaatccttctgatgctaggaaagaatgcttggccaaataaaaagaaactgtttcctacacaaaacaaacagtgtgcagtaatgtacactagaacactgaacccaggcatactcagttatcaaccttatcagcaggacaccaaacagacctcccccaacttacttagtggctcctagaattatcccacccccaatataaacccaggccccctaatcactgtctaattctctcttgtgacccagtttaaggctgagttttcactcccctgagatgtatgatgagggtagggtggtgggaaaatgcactgcagcaagtgtctgtgccagtttgggagaaatacatgcgacag

SEQ ID NO: 71027 - DNA, 953 bp, Homo sapiens
ctagcttgaattgaaagggatggagagaatcctgtttgaccctcaaaattctacagtcaggaaacaggctgatgaaactactcagctgccaacacatgctacccttcaggaaaaaggaaagacagctttgagggtggagccctaagtccagagggcaaagcctcaagactagaggatgaaggccttgacatttaatggaatgtgcctggctagattttgaaaatgcctgtgacctgtgaccccttttttccttttagtttctcccccattcaaacaagaatatatataattagtatcctatgcttgtcccaccactgtactttaacagcaaaatacaaaaaagaaaatacatatccacagatgtagaggagttttgccctaagatgtgccatactcagagtattgcccttatgtgatttagataatgagatttgagacttttgagctgatgacatttacatgaaatttttgactctgcattgatgctgtaatgggtagggacttttggaaacgttgggacggggtgaatatattttgcatatgagatgtaagtggaatctgagagaacaaagggcagactgtgatagacataataatgtttacacagcaagtgggaatttaggttactcatcaagttgaccttaagataggaagaatatcctgaattatccaatgtaatcacaagggaccttaaaagtagaagagtgcagcagaagagtcagaatcagagaagatgtgatgacaaaagcaaggtcatcagagtgatgcaatatgaggactcaacctgtcactactagctttgaaggtgatggaagagggccatgggcaagaaatgctggcagcctctataagctggaaaagacaggaaaatggattattccctagagcctccagaaaggaatgcagccctgccaacacctcgattatagcccagtaagatctgtgtaggacat

SEQ ID NO: 71028 - DNA, 1376 bp, Homo sapiens
ggcccgaggtttttatgcatctccttttgattactaactaagctatcctaaagtgcccgaacgtcacgagcgcgagagaaaaaccacactggtgtctttaacgcttcagacacacctcgtttcctccgttttatgagcggaacctagttcctggcgagagagccatccccctcctccgcctgcggagccggggccggttccgaggcccccaccccagccccggcccgccccgcgcggctctgcgcattcctctcgcgtccgcggcaccacgctggcaccactgcctcgggcgaacacggccgggcccgccctcgccactcacctagcagctccgcgatggcactgaagggtcgcgtgtggctgctggagttgctctggaggtagcgggggctcatctgggggcgagagaaggtcccgacccgcgtgaggcctcggcccgccgggccctccccgcgcgccccccgcagcccaggggcccgcgcgcgcgtccgccccctcgggccccggacctaccgtgctcaggcggatcccgaaggcctgcgggccgccgccgggccgggccagcccgcagcccggcgcgccagggccggcgggggcccctcggtacaggagcatttttttggccgccacggtacccgtctgctgccgccggacccctggcccggcggtccgggactagccctcgctcacttccactcgcagctggcggcgaccgtccgggaccggccctccctcgctcccactcgcagctggcggaggcggagcgcgctccagccacctgtcccgggcgggaggggtgaggccggctgaggcaagcggcggctccgccctgtcagcacctctaccgacccggcgactgcccgggctgcctctgggccgtacagaaatatggcgacctcctgacagccgctccttgatccccgcccctaattaattattggcgtatgccataggccaggccgccgagcgggaaagcgcggggggcgggggtggcgcgtggggaggggcgtgaatgaagcaagaggagggagagcatgtatgggatttctggaacctagtcccgcttaggctgcatgactaacaggcaagataagacaagtctttcaagttctaaagactacagtgttgctatctgggaagatagcaagctcgcctgatgggaaaacattctacctactctgcctcaaatgcctccagaagcacccagaactttctggaaggcaattagcaaactatctccaaagtcttgctagcatgcagggacggtgtttctaaaaggagaaattggattcacttaaataccgccaagtaggggattggtcgagttatgaagtatgcataaaatgaaataccatccagttcttgaaggccatgtt

SEQ ID NO: 71029 - DNA, 1138 bp, Homo sapiens
gtttcaggcaggcaaagtcataaacggttttttaaaagatgcaaggaactgacagtgcaggaaagcatatcagtaagaattttaaatgcactgcactattccagagtgatgattctacttgcagagtgaatctaaaattaatttaagcccgtcaatagttaggaggctcaggccatttaggctcaagcggccatttacctcaggacaagtaaggggaactgagcccagcaatgccttccacctcccctccccccaccccataaatcgaaccgctttggtgctgtccttccacatttagaaacaaagtaccgctcccttactttaagattcgaaagcgctacatggtttcggggcccaagcaagtagtctttaacacacagacgttgcaaataaatgcgcccgccccgagcctttctcaggtggaggtggaggtaggggagaacggcgaggggctggcccgaggtacctacatctccggcgccgggaatttgtcagcctcaaacccttttgcccagctgggtccgggtgaaacgacgaagccgcagcacccggccagctcccggggcccgtgccgggagggcattcccacagcagccggccccggtggcagcccttcctgaacttcgctctgcaggcctgttcagcccgtctcccctcctcccgtctcctttgtcgtgttcccgctcccacgaaaccgcatcctgagaacgtgcaatacccaaaccagaaagcaatggaagccattttcaaaagaaaaggtagaacaaagctccccttgccgcctgctcttcagacaagtccttacctcttcatgtttccacaggcccctacctccaacttgggtaaataggccgcggacctcaagtcccagaactccgcgcggcggacttctaagggtattgtgatggagcatggggctctgggaattgtagtagcacagagctatggcaacagaaagagaaagtagatctcaagtgacaggtatgctgaacattgtccaaatatttattttgaatttctcatttaggttcaaaagaagacccaaaatatccagctcataaaacgagtcacctttgacttcttgattctctcatccattaccactaattcctggctcttctgtaatttcctttgaact

SEQ ID NO: 71030 - DNA, 3380 bp, Homo sapiens
caggggtggggtgcttcgcttcctgtttccacccaactcctgaccccagtccaggctctgcagaggcactgcagtgctgttgcatccaatgagctcagccccttgccagctgcacgatgcacacaaatgcaagagtctgagctccctgcccaacaacaggcccaggagagagtcagagcctgcggcaaagacctgagatggaggagggaggaagaaaggagggagcccaggaagggaagactggaaatgccctaaaaggtgccactctaatcagactccacctccagtgcggataggaggcaggctgtcggcttcctcagggttttggctaagggctttttcacccattccctcaatcctgcccagagttacataagcagcagctaagtcaggggatgagaatgacgcagtgatgccactcaccatggcctgttcgatcttgttgtctatggccaccacgctggctccggaggcactgccaagacaaaaagcaaagcgacccattacccactcggttctactcttgagtacatggcagttgtggccaaagtcctccatctgcctcggctcttcctctctctctccttctcgcctccctggcccagagttccggacagtttgtccccagatccttccttggcccctgcaggaagctgcatctcctcatccaggccggctcagcgctgctgccgccgccccgagttccaaccgatcggagctgcttgcgagtcctggggcgcgcaggccaccgtggcctgctcgggcaatatgcaaacaatggggctgtgcgacccggggagtcccccacagccggcctacaaggtcccaggcaaacctacccggctctgaagctagctaggaattccttctcggctggtaagcttccggccttctcccaagcggcgcacggcgctcggccagccccctgcccagccctgtctggtcctgcccgccgcccctctgcctccggctgcctctgcggctgcagcagctggttttcacggcgcagcggccgcagggacgcttcgatgacggatcccagagcggcggtgaccccccccttcctgcgtcccctcccccccgccccttcccaggatgctgcaccgcggggaacagggaccggcggcacacagctcgctcagagaccgggctcctagcccagctccggccggcgccccggctcgggaggcgccggagctggggccagcggttacctgttgtccagcttaacggaaaccacatcccctccaagcagagaagagaagaaggagatggagaaattgtgcagctggtagaccgccacctccatgggggtctgatacatttcggtgttcatggctcgggctgctaggaagctctggccgggtttcgtgcggggctgggcggctgggcggctgggtggctgctggcaggctgcgctgggctgggctctgcgctggagtccggccctgaggctaggagcggggcgaaggctgcagaacgaacccaaagccaagcaggcgctccagctggagttgaagggaagtgactcgaggggtgtcacctcgtatgtcacaaactccacggccgccagtccaacccagactcggagatattttggctcctgcttctttatataggaggagccggctgcgtcacatggcgtcaggggccatgcaaatgagtcctgtaccgggctttgtggcccagttaaaccacatcccctccctgaaccttaggctgggactgtaaacagttcagcactttcttgtaccaactggcatctccaaagaaggctctggagatcgataaaaaccaaactggagctgatttctagagaaataagaaatacaaatgccctaacaagaggcagagggcattcagtaaagaacagcgctagtttgaaaagctcttcttcaggtggcagccagcatgcccccatggctttgcatgctctcccatgtcatactccctggacacgcgccctcaccatcacggcctcaccctcttcccagtcactgccctctcagtctctcccctgcacacatactttgtcacctgcacattcactctctaatcaactcagctttcccctcaccagccagctggcctgccgacctgccctgaaccccagcactcatccacttgccccttcctctgaatgttcaggtgtgggagtacttgtctgtggaccggcacatgtacagatctgtgacatgcatgtaatgcatgcacaggtccatgctaatctacagatgcatatgtatggaggagagggtgtccgggagctgaggtgagtgggtgaacatgtatgggagagcagctaggtgggtgacagaggaggtgaggaggagacagggtattggagtgagcactggagtgaccacaagatgccagcccttttctctttagtctccacattctactctttgaagaaaatacattcaacattatccaggatcccgtgtctctattttttaaaaacacaactttgttacttttctttaaaacagcgaatgacaataacactccaaaccaaaggtatacatttatataaacgatcccaggaaaacacctgccctgtgatgggcccagccatgcacagcattagaggtacttcaggaaaaacagactccaaaccataaacaagatgaggtgattgttccataataaaagttacacgtttccattaaaatatatcttatttatattcagcctcaagctgagggaaaaaaaataaaggcaccagagacttgaggtccttttcttctgctccttcctaagtgaggccacctggtggacaaaagcagaatttccaccagaaggagcaagaggggcagggacaggtgatgcaaccgggaatattatttacaccaactcaggaccaaaggagaacattgggttccaccacatatacaacagtttggatgaagttaaggccagtacccatgaatcagtgctccacaggctgtggtccaaagaaagatcctaacgcaatcatgctattggaaaagtactggggcctcttatcagcaaagaaggtaattattgtttgcttcaggacatttatcttaaccaggtgcctggcactaacaccctggccaaggccccagccaaatgcagtctgaaggccttgatttcctcccggcttccagggcagttatgccactgaacagccaacatttttggctatggtgtggtgctctattggtggattccagtggtgataatatgtgtacaagagccattatattgcaaagtactgaccaatagaactaagtaaacctgctgcactagcccgggatggtgtttttcttcatctcactttaggtgggagacaataatgatctcaggacattctgttaactttaagacacaacctctctgaacacggtgtttgc

SEQ ID NO: 71031 - DNA, 1726 bp, Homo sapiens
ccaactcatgggtaacacatccctttgcaagaacggcctcctccaatccagctggggcagcaatctgctcacttgctcagcatcaagggtactctctgtggtccaaggaattctgtctgtagggctagcccagtgcaaagtgcaaggctgcaggagatggatggatggagataggaaaaggggagagaaaaggagaaggagagactgagaggcacacacagctggcaagagcccatctccagctgttgggcgggctgtttcctttgataaagcacttggcagtactcccagttctgtagtttctggcctgcgaaagcacacccggagcacgagcctgcctgtgggaggacttcagccttgctttgttttctttctttcctttttttaagctttagaaaaggcccctcccctcccaaggaaccttgtccctcccccaacacctcggcaaagtgaagttgcaccagcaggtgatgtgggctgggcttccgggtgccttcacagaaagtcagtgccacagagccatgttaaagggcttgggacgggtgtgcagttaagtctcagcatatactttcaggcacatgtatttgagagagagagagagagagaaagagagagagagagagagagagagagagagagagagagtgtgtgtgcgcgcgcgcgcggtgtttaggaaggggggagggagcgggggagggagggagagagagagaaagagagagagggagagagactgagttgtgtgtgtctgagaggctctgcttgtttgttgtggttgatgctgccttctgtgtggcacatcaccactgttctccccgccgaggctcctttcagctcactaatgcttccctggaaggcctgggaaatagagggagtccccatgtcacaagatcacacagaacaacaagcctctctgcccgctggtcttctggctttgtggaagtccgtctctcccccttcaccctccttcataaaaggagcaaggggacttgaaggcatccaaggtcccttgcagggaccagagcctgtaatatggcaagtctgcctgccccctccctgcatttacagtccaatgacccaacggccccagaccccagacagtttaaccagcccacgcacgtcctccctgcgagtttcccagattcctgaggggaacctgatcccgccctgggatcagtatgggctcttcacatcatccgcgagagatccctgctcctcgggagccccgagagcagcgcccgttcccacaggctgccagccccacagcacctgtggttgggaggcgacctcccagagtcagtggtgaggccgcccagggagagggccctgtggccgggtgggaaacacgagcagaagcgacagaacttccccctgccagcccaggctgccaggatagccctggacactgccccgtctgacccgctgccccaccacgcccatccaaggctggaaccagagcggcccttggccctgagctacgggagaagccagttccgaagaagaaaaggcggcacaacgacaaacacagcctgggaactttgcaccagcttccacactggaaggcctcaaacgtcccttgttccaaacaaccccccatacccccaacaaaagtatttacctcatgaagaaagggagggcgctagactcacagaacagacagcagagccagaagggcgatcatctagtctgaccctttcatcttacatatggggaaactgaggcccac

SEQ ID NO: 71032 - DNA, 835 bp, Homo sapiens
gtgggtctgtcagatctaagcagaatgtagtgtgacatctaagtggtgggcactgtgatctacgcagtgcagtgtgcacagaaaacctagcgaccagtgagtttttacccagtcccgctagcctgcccattaaaaagttcaaatgtggcttggctgaaaagcaatcagatctgttattgacactgtttcattctgaatagcacagaggactaaaggctttctttacttagttcattagttagctaacaagcatttttcaagcacctactgtgcatggagcactgtcccagacactcggctgttgccgttgctgctctgctattgaatttctaaatacaggctgttgccagacatccaattttctgagtgcttgctctgacagggaacaatgactaatgaaccaaacatcagggagggccctctgatctccagcacagaacatgcccataaaggcagattctaatttgttcagcaagcagctgccaattcttctgggatcttaattacctggagcagtttatgtgggtgaatccccttgggagagaaaccctgaaccctgtctttctcataccctatcataccccaggccctataagtggctttaactctcagccactgcatatgtgtccaaggtccaggccacagcagttcaccagataggcattccaggcactgcccacggccttcttcacacccctgcacacacacccctggacacaccccttcacacatgcacatacatggagggagctgtatgtaaatagtggaaaactcaatgggctgcaagtcaagagacaggaatttcaatccaactctgcttcttctccgtgtgacc

SEQ ID NO: 71033 - DNA, 2562 bp, Homo sapiens
ttgttctaacctgggggtttgtggggttgggggacagggggattggggagtgggagaagagtttagccatagccttccttctgcatttcacacacatttagctatctctgtcgctctgtcacacacacacacacgcacatacacaccatacacacacacacgcacacccgtccgggtccctctcggtgtgtcttccttcaagatgacagggcgctggagaaaaggctgctggaatcagctggtaggtacagtagtaacccgagccccacccaccggctgcctttgcttgctcaggtttctccggtcactcctgccaggggagaagacatgtaaacgtgcctccagaggaagggctgggggagctgggagtggcgggggcggcggaaggtgagcctgggaaggtggccgagcaccccttcttcttgggcccttcccagtgctcccttggggtgtcagccccagccccgtttgcccccactccgcctcccttttggaagggattgccttttttttcctctgcggcggcggaaatgacagtgtggtgctgccgtggtgtcatggtgctgcccctggactgaggggcgaaaactcttaagtttagctcgggaggcccagctgcggtagcatcgcggccgccgtgctgtcccctgcggggcgcgcgggctggcggatcccggctgctgcgcggcgtcggcgacggtagcggcagcggcggcgaaggcgggcggcggcctacagtggtagcggcggcggcggcgaccggggcccgggagctcgcgccggagcccgagccaacccgctgcggaggcagacgagagcccagcgccctcgagcgagcggaggagatggctggcacctgggaacgctatgggtaaaacgcgccccctcgccgcggccctggaggtcgagcgtcgtagccctcgcagggctagtctccggctccggccgcttttcaggtgccgccggggcccggcgttggccgagggctctccggctcggcgaggcagggtgatggggcccgcgaggctcgaaacggcgacgggggccccagctcagctccggctctcagtcatgctgttggggcccgggttcctgccactgccctcctgggacggagtttgcactccggggtgcggggcgggggcggccgaggcctctgcgcagcctggccgggcccggcgcgggcagtcgagcgaatcccccggcgcctgggcgcgagtctgggaaagggcacggccgccttcccacgctcccgcagccggcagcctcctcggcccaggcgtcgccccttggccggccgtctgccgggcggtgctgtcgcagcagccggcgtggctgcggacgccctgccggcggggaggcccggtgaaacttaatcccttttctgccagggagcgatcctcgagtctccgtctggatggttccttatttctggcctagctgtgaaatcagctctgtgggggagagggaaaacttacatatgtccacaggacagactgcgacgcaaccagggagagtggggattttccattcctgccttgtaagaattaagtaaataacggcggagtagatttacagaaacattactggtgatgataaggtttaggttacttagcacttcgtgtgttgcacattatttttcagaggtgtttcttcttagagcaggaaattgaaatcctgcagtcgttgtactctttactttctctcttccacggtcccctacccgttttcaggatcactcaccttcctatgtcacaacgcttacttgcctacccaaatcccccagcagagccccttggaccccagcctttccccatcaacgtgtgcactcccagcctcccagccatgcagcatcttacttctcaaccactttgcctttttgaggatttctgagtgtggggcggatagatggtgatggttgtgtgtctctgaggatgagcccttataaaggaatatattggaaactaaatagagaagtactgtgtgtgggttgatccctctgattctcaagttgggccagaagggctgcctttaaccccattctgctccgtcccagtactctaatcagttctctggcaatattccaatagaagggagttgctgaatagggagttctcctcccctacttttcttctgtttggggagtggtttcattgtaccccagatggttagcttccccctgcccacccccgaccctcacatccccctgtctgtctcctctcatgactgtactgagggagaaactgtctttgctatttttatatattcttgcccaatcaatgaacttaacatggatatgtaatgtgaattagatttttcctggttgctcctcacaacttgatttatgtgtttgttatagtttggatatttatccctgcccaaatcttatgtacaaatgtaatccccagtgttggaggtggggcctgatgggaggtgactgcgtcatgggaacagatttctcatgaatggtttagcaccatcaccttggttgactgtgagtccttgtgatagtgagtaatctctcctgagatctggtcgtttaaaagtgtgtggcacttcccc

SEQ ID NO: 71034 - DNA, 946 bp, Homo sapiens
agaaaagccatacagaaacaaacatacatatctgactatatatggcagtaactaaatggtttggaagggaactaatcagggtgtgtggatgtggacatttgtttcttaatatggcaattgatcgtgccctctcaggtatttcatcaatgcgtttttatgacaaattgtaaaaactttcaagattacctgtcattgagttgcaccctatcagattcacatcctgtcttcatccttagcatactctctaactctgtatagattagtgattcacaaactttttgaaattgcaacagtttgccattgtttaatttttgtcatgccacttcctcctgctaaaagtatttcatgataataggagtcaaatatttttcaggagtcacttatatactttttaaagtgaataaaaattgggagctgagaattttgtaacactcattgatcactagagatatcccagggtattgcaaaacctagacagggaatcattgacctagaaaaacaattgaaaggaacaagcaatccaatagaatttataaatactatataatcacacagttgttagtatagtatagtgatttgctgtttacaccctggagtcagacagacctgggattgaatctcttctttaaaaaaattagatgtaattcacatgccataatattcactattttaaagtatacaattcagtggtttttggtatcttcacaaagttgtgcaatcatcgtcactatctaattttagaaccttttcatcatcccagaaagtaactccatatttgttagcaatcactcctcatcccccatcctcccctgccctgctcctggcaaccattaatctactttctgttcctttgggtttgcctattctggatatttcataaaaaaggaatcatacacaaaaggagccttttgtgactggcttcttttacttactgttttcaaagatc

SEQ ID NO: 71035 - DNA, 608 bp, Homo sapiens
aatataatataggtgaggaaagatcaaggaaacaagaattactgaacacaaagaagtgaggtttaaagggaaaaatgtgataatggccttcaagttcatgaaaggttgatataatgaggtaatgccttattctttgtctcacatgaagctagaactgacaataacttaaaccgtagcatcagggatttaggctagggattcattcattcatttaacaaacaattaatgaacattcactttgtttactaaacactttgaccactgtggtaggagctgggacacaggaaataaggcacaatcccagtcctaaagggactttgaacttagtaggggagatagacaagtgggaaattccagttcagtatggtaagtgccatgacagaggtttgcacaggatgctctgaagcacagtggaggggtcagggaaaggatatcattgagttcaaaaacagggaatcatgagtgaatttattggagaagaaggaccaaaccggagagagtccatgcggaaagaattgacaaaacttggtgaatgactatgatgattatacaccatgaagagaatgaattaaaaaggacttttgaggtggagatgtcttgaaggatgg

SEQ ID NO: 71036 - DNA, 2363 bp, Homo sapiens
cagtatgtaaaaaataaaggtatttcttatataactatgagaccattattacacttactaaaattaacactaactcctttagaatgtctaatatccggtctgtattcagattgcccccaactgtctcccaaatgtctttttgcagttggtttgtttaaatcaggaaccagacgagatccataaattgcatttcttcatgttttttacgtctcttgatgctgaatagttcctttccctttttaagccactgacttgactgaagaatggttaaatttccaatggagtattaaatcttaatataaagtattacatttaaatttaaatccttaaatatcaccagaccataatgaagtaaaccaggtaaagataaggccattttcaggttgagtaataaaggaaagttccagaaaagagaaaacagtctcttgatttctaattctctcccaaaagacacaaaatggagatctgtaagtatgggacagtctcactagtgcttacgacactgtctgcgaaacacaaggccatctataaatatttgtgggcttactaaaggcaccatgaatcctagaaactgaggatgaaagcacgagagtcctgtgagcaggagggcagaaagaaacacttctaaacttctgtctacctctgcttagaatgtccactcattcccccatggaaatcccactcatgcttcaaagtctaactaaccttcccttctttgcaaaaacttttccaattaacgacagtcatattcagcatcagatcctcctattaacgtgttctgaaagcaccatgtaaacttctctgccgagtatttaccacaatttgtaatcggacatgtttttgtgcttattttattgtctgcatcttccactccaccgtatccccagctcctagcaaactgcctggcacggaaggggcgttcaatttcacatgcgttactgaatacagttactagtaaaggtaaataaatccatataaaaagccttccttttcactgattgggagtttctgagaaatgcggtagacgttctagaactatccaaaaatcagggagcggagctccgggccaacgggaaaatatctgaggtctgtggggctagctcccgcaggcctatcgcgagtcccgaggtgacccagggggactgcttggggcggcgggggcggggttctgcttctctcagaaacggggcctccgctagggccgggccccgaaagccacgtagggcttcgccgacgtcgccgactgcggagagacctagcgttgctttacctggtcagttctagtagccagggatttatcggccagaatactctccttcaactcttccagcttcccgctgtaggccaggttgcagaccattaggttagacacacacccctccatttcgctgtcccagcaactacttgtcgcgcgagcaacgcccgcctcacgtcgccggctccggctacgccagtcaaaacagccgttagagcttcaccaatcaccggccttcctcgttcccttttcttttcccgtcgcgcggcgcctctgggagttgcagtttgagagcagttccgggcagggaggcgcctttgctgccctcacagacttggcccctagcagtgcagaactacaagtcccagggatcctagcgaccgtccgtccgtagtcaagttgccggtggaattggcccaggatgacagctggagaatggagtcaggtacggggagcggctttgagtggaaccgtgtgaaagagccggggtgggtagtcgctggcgggtcgttgagtcggccatatgaaacaggttcgggggcagggcaagagttatgagagcctaaaggtcctgtcccccggggttcctgacctgcagtggcaggcggaagggacaagggttggagctgagtactacctactgagctcgaaccggtgactgtggctaccctccccctccctgccaccgcctagggagtggaaagaagtgggggttaattactctgacatctcggcggtgtggcatcaggacagggttctaccacagcagtgatagcatatggcaccgtactgaggtgatgtgccagggtgatgccaaaggcagggtgtgatgccgtgggagccacctgatatctaagagacctcggtgagtccatagcctggtgacatcacagcttgatgagggtcatcttaaggataccgggctgtggtgttggcattttaatatcacgatattaactatgttgtcaaggctttgctacaactattaagctaatagtgtttctttttatagaaatcccaaatagtgccatagcagaagcaatgcaagactgatcctttatagggcatatccagaggacattatgccacaactaggtaacgataagaa

SEQ ID NO: 71037 - DNA, 473 bp, Homo sapiens
cactgctcaaaggagataaagcaattgaaagaagaggggatgcaatgtataatctaagggggaattagcagagtacaaacactggaattgaagtctccaaggccgaaacccaaatgaaagcacatatgccttcaggaggaaatcaatcgtgtgggactgagattggcatacgggtgcacatgagtagagctttgaagttcaagcccaaaatgtaacctttgccttggaaaattccccagccaaagtcacagacactaaacaggaagcacatactctatgaaagcaggcaatgccatccatgatgtcttccaggccatttctctaaaacagaaggttcctcctgtttagatctctttgtagcaatgtatacaaatgttagttccaagtgaggaaatttcattcgtgatttctcaagaatggaatttatccaagaaaaacaaccatcccttatgacaattatctccctcatttat

SEQ ID NO: 71038 - DNA, 687 bp, Homo sapiens
gctaaataaggtttagctactagcaggctggtgaccttgcgcaagtcacttaccagtttctttatttgttgcatacatacaggattacagcccctgaaagaagatgttttggaaactgcaaagcagtgcaccaacattaggtagggacttttaccaggcagggcatacctttgagaaatctgtttgagatagcttcatccaaaaagggttggattgcagttttgcaggagtgctaggtgttgtgtaaatgtcctagtcagttcaagaggactttggcaaaggaaaagtacacactgcccagcaagctatgcgcttgatgtttccccaaggcagggggcaggcctgccaagggctgcagcacatctcagggtgacccaatgttccgttgccctcccagctcaagaggaacagcttgaaatataaatggtgccctctgctcagctaaggagaacagtcccaaatctttctgacatctgcacacaaggggtactgagaggctgtcctgcagggtcaatagtgctggggccaatttaaacaattctgcttggccctgggaaggtaggaggaaagggaggatgactaaacaggacctggtggtgcttcaagcatccacgttcagttttctgcatgagcatcggtcttatctatttgggaaataggacattcctgctcttgactcatgaaata

SEQ ID NO: 71039 - DNA, 512 bp, Homo sapiens
gaatggatgaacgagattcccactgtccctacctactatccagcgaaaccacagccaagggaacggacttggcggaatcagcggggaaagaagactctgttgagcttgactctagtctggcacggtgaagagacgtgagaggtgtagaataagtgggaggcccccggcgccccccggtgtccccgcgaggggtccagggcggggtctgccggccctgcgggccgccggtgaaataccactactctgatcgttttttcactgacccggtgaggcgggggggcgagccctgaggggctctcgcttctggcgccaagcgcccggccgcacgcaaaagagctcctgaaggaagcgctaaacatggaaaggaacaacgggtaccagccgctgcaaaatcatgccaaaatgtaaagaccatcgagactaggaagaaactgcatcaactaacgagcaaaatcaccagctaacatcataatgacaggatcaaattcacacataacaatattaactttaaa

SEQ ID NO: 71040 - DNA, 2034 bp, Homo sapiens
caccttacatatagtcagcactcgacattttagttattgttagaataccttgcagaataaatagcccttaaaagatggtgaatagcactgtaaacttaatttttgttggtgtccgtgagacattttaaaatgccagaatggagaaaccagatgaacttttcctgttcaatgtggctgggttaaaatgaaatagtaattttaggcatactgccaaaacgtagtaattcagtgaggatgatccttccagaacgttccagaatgctaaattgttcactagtcacgcacgcctttccccaagctctgcccacttatcctataggctacggaatagtaggtctcctcgcatttctaattggtcttcagagggctttggctccgcctcctggggcaaaaaagtccctgtaattgaacactttcatttttgcttgtccccaggcttgtcgttagaaaagtaggggactttcctgttgagtatcatgtttacaaaagcaaagtggcttttaaattttaaactaagtatcaaacaagtagataaggtggatgggagggatcttcaggaactgaagggaagtggaacttaaggttggaacatcggtgtgcttttaacgacggaccgagctacttccgggagagaatgggagggtggaaaattttgtgcgtttggcgggtttcgctctcttcataagtattgatcattccgcagccctgcggaccggacacgtgaggaggtagtgacgccgacactgccagaacacactgctacaaggtcccagatggccacgtctctggtgagtgcctgggccgtggcaggacggctgggcgccggactccagtggctgagaggagggattccggggcggtctggctgctgctcacgtggataggtgacgaatcacgtcccggctctctgcactgcggggcggggcccacgctttgctgcccgccctgccggccccacccccagcctggttagcagtcgctttctgatcccggaaaggaccctgagctgggaaatagcgagaggcggggatgttggggtttgttgtttatggcttgcagtttctttctctcgattatcttcctctctaaaaatcactttcagtcacctgacaaagaaactggcgattcattgttcttaatttagtaatagactgggccccgtacatgaatgagaaggaaggtattccttaattctccggcacgaacgccaacagcgttgctttcttcggtgtcacagttcttaggcaaacagcagtgaatatttacgcaatgtgggaaagtttcctaagtggagctgccggtttttcaagtagttgaactactttcgtgtgtgtgtgtgtgtgtgtgtgtgtgtgtttcccattcatcaactttggagtttggctctaacacctcacttgaaaacagaaaacaatttcctagcttattcagtggcagtttttgccgctctctctccttttctaaggttcaggtggtgtcattttcattgccgtgaatgtttgtaaaatattgaaagtctaaagtgcttagttgccaagaaaagattataaatttatatgtggagactgaaaaagactcagattcattgagaagattatgtcctaaagacatgcacttaaaattagtgaaaaattttaaaattgcaaacttcagagtccggcctttaaaatgtctgaatttatatgaaagaatgtggactgtatatagagctacatagtggttgaaataaatcatcagcttctgtcagtggttttgtgtttgtgaggggttgaaaaggttggtaatctatacttctggaatttttcttgtaggattttaaaacttatgtagatcaggcatgtagagctgctgaggagtttgtcaatatttactatgagacaatggataaaagaagacgggtgagtgttatagactctactactctttatagactactactctttattaaataccaggttgtgtctggagccagcgtttcatctgacttgcataagtggtaactgtggatttactctttaaaagcaaattgctcag

SEQ ID NO: 71041 - DNA, 1507 bp, Homo sapiens
aggtgaaaagagcgaatagagcgtattaatttcaagagggtgaaaaatgcctttgaaggaggagatgctggagtgaagaggagaaatgacgtcttatttaaaatatgtaaccccttgatggggttagacaatgaatcatattctcctagatttttctatgtctatagacatcagccacagttctttcaggcactcaaacgagaggaagaggaagtgaataaagctcatactaaatatatagcacccactgaaggcagggatgtagacagaaagaacgggggtgggggaaggaaggaaagcacgcttcgccaggatccagctgttttctaacaaacctaagcctacggaagctaggaagatatcggaagcaaggaagatatcggaagcgacggcatccctcaaattcgagagggcggatgcctctagggctagagaggctccctagccctcagttacagagcgactgggaggggacaaaatggagttgaggtttaggggcaccctaaaggtcgtttggaggtctagcaagcacttcatggtctcctccggaaagggccgtggcaaagcctagtaccccgatcaggaagatgacttctggccctcgggatgcggtgagcggcaggaagaggcaggctggggttccgaggaccccagagtccatcacaggagcagatacagtgacctcgggaatcttcccggccccagcggaggcgagcggatagatagccctggctcaaggaaaaaagcgagccgactccaggagctggaatgcccacccaacctcctcccggctcaggtgaggtacgccagtccccctctggaaatggggccctggtaccgacagggcaggggtgccggggccgcaacctccccatccagggatactcaccggaggggcggcccaccgcgtcttcgcagccggccggcgcctggcactcggaaagctcgcaaaaaggaaccgcgtgcccgctagcgctgggacgaggaggagcgcgcggcggaggccagagaaaaagccgcagcggcgcgcgcgcacccggacagccggcggaggcgggactcagcgcgagcccggaaaagacgcgcccggaggggcgggcggagcgggggcgcgcggtggtgtggcagagccagccgaatcgctggctgcagacggctcggcccacccacgcgcccgcccccgctcgcccgggacgtcagtcgaaaaggcggagccgaacgggcttcccggggcgcgggaggggcgctgcgaggaaggcgaggcggctaacggctcgcctcaagttgttgctcccgctggcgatccgcttctgtcagtctcgctgctggtgtcgttgagtgtgtttcgggatgtccttgcgcctaacagcagtgaggcgcagaattggcccacgccctcacctgcggcttgcttcgcaggactccaccccaggataaaagttcccctcgggtcatcttccagctgccctcaaaagacactcatttttgggtttcactgctcctcttt

SEQ ID NO: 71042 - DNA, 987 bp, Homo sapiens
cttcccaggtagatcttaaactcctgactcctcatcagagactgaagttgccagttgtactcttgtggcaatgtgatgacccagagctcactggggcctatgttagaagaaaacccctatagtggcagggcagaatgacctcaccatttattatgacttttcccaaaatgggaaaaaaaggggggagtttcaaaacccagtaccttcctgtagaaaataaaatgcatcatcagattaaatgaaaattaaagtgtcctcatttgagatcatcacagacgttacagcatgaaagactggaaaaatgcagaagatgaaaagtgttgtagctactgaataggagacagtgctatgtcctgtctgagcccgttgcaccatgtttgaaaaacaaacatctatgacacacattgcaaaacctagattaagaaacctcagggcagagggcagatcatcacacgtacaagtgtacccaggcacttggccagtacacaaagaggtgcatggcttcagcacttcgaagtctgtgtccttgggcctctttgtttaaaaaaaagaaccattttcatgatacaggtttgatcaaggcaacagttttactttctgtaaatgtaaacaaagaaaggatatgcatttgcctgtgaaatttaaagtgcctaacacatgaacttttcaaatagaatgatagagctgtaaagaactttaaagatcatcaaaagtccagtcacttatttatttaaaaatgaggaaactggggctccaagaggttaaataatttacccaaggttacaaaacttgttatttcagaactgaggactggaacacagatctcctgactctcagttcagtgatcaccccactttgccatgttgcctacctcatactatttcctagagattttacaatataaccataaacaaagttatcataaccacactttctaaagtgccctgatttgcttggattaaaaaatcaacaggaatatctaaggaa

SEQ ID NO: 71043 - DNA, 627 bp, Homo sapiens
gctgtacccttctagagtggtgggaagagggatggcccctcgactattatggtcttcaagatggttgtggtcctacatgcttagctattctctaagaatacagctatgctttctaagtataaaggctgttctggaagaaagagcgagaaaggaaaagaaaaaagcaagggcttcccctccacctttgttcgcttcattctgtagtgcatacttttatgcccttgggaagtggaagggaggaatgagctaataatttggttgattcaaccttctgacctctgagtcaaaaaattacccaatagtccttttagcaggcgatgagggggtaatgcattcagagtcaggagtctgtgcctctgataatgattcatatgctgagtgaccttcgggtaagccatgcaaactccctccgtttcaatatcagtaataccaactgtcccccctatctcttggggttgttatgagagtgtgatgagatcacagatctgaaagcattttttaaatgtcagacattatcataccaaaaaggaagccgtccaccaagagctggtctgtcttgatataactttgttacacaattgatgtattaattcctgttctatttttctagctagctgcttctaccac

SEQ ID NO: 71044 - DNA, 888 bp, Homo sapiens
agaattgggtaaaacaaaacaaagtaaatacaaacaaagaacagccagaaagtaataaacaaaggacaattgggtgaatggaatgaaacatgaagaaattccagagataaagtgagtgcagaagccttccacattttttcttaacccagccacagcacaggtttaagtgggtttgtatacaaaaatcatataaaacagcttgagtagagggaagagtctgtttttttcttgttttgttttgtttgtactcatattttgattactggacccttgccttgtttcttttaacttggtgctccctttgctcccttattcttgcataccagacttggtaatgtcagaatcctgattcatctgggcctggggccctgccatacctgtcctaatgttgtctctgcttgaacttcaatctcctctacttattccctaatactcattatctattccagtgctttggatatagccaaatgcctctatcaatgagctcttccaggctactgaggacccacctacaatttctagttagatgttgctaatgccaattatttatttacctattgcctgttgttagactttaccaatgtgctatctactggtccagatgtcttatctttgcacaataaatgtgtattgaatttaacttcctggaaccttcccagattgcctgcgctgctccagtgggtctggctctccctggtgaggttccagggttgccagctgtctggttttgacaaagacagtctaacatttgaacttgctgcccagtaaaaaataccagacatatgactgtccctttttttccaattaaataaatggtatcattttcttatagcaaaactagtatacacataagcagtgcaatctgatgaaagctagaaattgttttca

SEQ ID NO: 71045 - DNA, 1494 bp, Homo sapiens
cagcaaccccaccctgacactaggaaacctgggactcctggcagtgtttcatagaggagctcctgaacctcttctttggagcaaggaactgagcatgttaatatgccagagttggggcagtggaagcagctatactattacaattcgatcacctgtcaccttaggaaccaatagccagaaccctgggtgagtgacctacaggacaggtcaattcgatgggagggagggcaagggctatctatgccctggaaagctacttcataaaagacatatcagaaagggatttggggggctggagaagagcatgaagatactggagacacagagcatagaggagtggaaaggtagacaaggaggaagcaaagacaaagttggcctgcatataacttttctgagggtcaatcttgtatagaggttattagcctggctgggaaagaaccacagaaggaagtggggttaggaaattcaatcagtccaaatgttggactagggcccctggtctctttgaacatttttttccatttccttgcataaccatagccacagaagcagaggaggagattgtgaatctggcctaaggtcttggtttatcattatctaaatatatatttaacaaaaaccaaacagggctttttaaagctctgagtcatgttgtttctgctatttttttttttttagggaaatgagcttgttgcttcatcaaatgatgggttatttattgatggaaaaaactaaccaggaggaccgtttccccatactgtttagtaactttacacatactcggaagtcttatttacatatcagctgaggactagcagttactaaataacaggaaattccgaaaatgttttagtaactgtaaggtatcaaggcttttcaggtagagatggcttcatgtccaatttgtaatagtaaagctgaagttgatggagtttcctctctcaactactgaatatgaatacttggtacccactagttagttggtcattcaacaacatttactgggcactcactgttgccctcactgtgcctaataacaacagcgactatttatggagaacttatcatctgccagacactgggttaagtaaattatatcatttaatcctgataaccttcatacttggatagaattactaccttcattttacagataaggaaacgggagttggagacattaagtaacttgctcggggtcagagttcaagccaggtctctctgctttcaaaacctgtgtcctaaactataataacaacaaccacgacaatgacaactgacttttattagatgctcaatgtgtgccaaacaaacgcatagtgttgtgtatgcatcgtctcatttcatccttataatgactctatgagttcatcactattagtattattagccctattttgcatatgaggaaaatgagactccaaaaggtaaagtaatctgcccagggacacacaggtggtaaatgaaagaactgcaattcaaaatagctccatctga

SEQ ID NO: 71046 - DNA, 674 bp, Homo sapiens
caaccattaagaggtttactggaatagctgcaggacatgatggcaagaaaaataacgtgtgactgagtcagctcgttggcccattttcccctgcctcctcctccctctcccacccccaaccctcaactttagtgaagcccagtctcaagtaagcctggccagaggcagcaggtggtaacaactaacctttagccagagtgagtgcagggccaagaaaacaacacagctctctctggcaaaggcaattcccagatgtgcccatagaaagatgtaatatttgctcaccacaaagtctgcaagtttacattgcaaggattgatctttcaagcttgcaacattttgaataaacctgagtgggagattgagtcatgagtttattttgtaatcaataatttcatggacagattttatcctttcattgcttaatttctatccttgagtcaataacggccccatattttgatctctgtggtgactttcaatcaactttggggtttcgcagttttcattccaatgggctcacactgccaaaatggatactgtcattcaataaggggaaaacagctgtttccaggctcaggcctggccaggagataaagtagtgctggtatctggtaaaaggaagttatgcctaggtggcatgtaaatagtattagtacttttgagccatggtc

SEQ ID NO: 71047 - DNA, 748 bp, Homo sapiens
actagagtgaataaaactttgttagaggggaagagacaggtggggctgaagctgtggacatatgtaaggcaataatggaagaagagcaggctgggatgggttgcggagggttgaaatggtcagacagataatttggtcttgattgctttacctcagaacttcctaaccagtgtgccaggattacagaaaaacccccagcctgcaagcaacctattcatctgtttctcacagtgtgctataccagcattaccatttgctatgcctgccatgccctgcaaagggaagcactactttagatttcccagaagccacattgttgggatgggattttgaagcatgccctgtagccaaaggtaaagattaggacatggagagttgcctaatccctgagtcatactggggaagatccaaatccagggttgctctgcttttttcccccactacccatctatggcaaagagccactgccaactctcactctctgtaagcccaacatcattattgacaagagaaaggaaaaagttcaatgcccactcacacaacccagtcctggaaggaaaacctttgaaaataggatcatagttcgtgcatgtggagcgaactggaaggctctatattttgctgaacatactttcttttctcctggccctatgtaacaggaccccagggtttcatgtcagtggttttataaattattaaacaaaatagatatttggttcctgcttgattgtggtttggtgggctttcc

SEQ ID NO: 71048 - DNA, 1679 bp, Homo sapiens
aaaggggagagaagatgcctttctggccttgcatgagtcgtggcagaaaggaggaatcgcgaagaggagccggccatacccagcacacaccccgaagccaagctgctcattactagaaaggcttattcccccacaagaagttagtgcgggccagctaagtgcctactatgtgtgcagtatagaaagaagtgccctggagaaccaggtcgcgggaggcggagccagtcaacagggcttcaccgagggggcgaattctgtacacggttgtgaaggagggtggctgtgcacgcgtgcaggctccgagtgcagaagacgaggcaggccagggaggaggcggaaggaggcggagcctgagccggaggagggaggaggagggaggaggaggagggagagccgaagccgcggagggtgggaggtgtgaatggtggacgggtgaggggagtgccagaggcagaaaagggaaggaggcgaggaggagtagtcgtggcccgagggcgtgtggtggggcgagagctgaactggacgggaggagggaggcagtggcggtggcagcggggagggggaggagagagggaggggaagaaggaggaagcgagcgcggctgctgcagggggaggaagacggggaggaggagccgtgcgccgcggcggcggccgccaggggaaccgagcgcccggcgcggagagcgcgggagcggagcagtagcccgatccggggccgcgggccgagctgccggtgagtgaagccccgaggggcgcggcggccggtccccggggctgggcgggaggcgcgggaggttgcggcgccggggaggagggaggggggccggctttagtccaggggccggctttagtccagcccccggctggcccggcctcccgccttccctctggcttcctccctccgctgcctgcgcgaggggggcaggtcccgggcgggccgcgggctgggggtggtgctgcccggagggcgggcgtctagggccggagggtggagctgggggttcgggggtgtacccgggggcgggaggctggacaaggacggctctaaattggctggaggggcccgtcggcggcgaagttgctagctgggggcagagacggccacgcggttgcaggagtaagagatccctctgtggcgagtgcgtgagacgaggagtccggcgtccctgccatccccgtcgccctccccgcctgctcggccccgctagctcctctccttgcctccgcgtgtcccctagctctgaccccttttggctcccggttcgctgccgcagcactgccgggtctccttggcccccgccctgaccctttcggcctccggcttcccctgacccctgcttgcttcgccactgccccgttcccgttttcttccctcgctagttacccctcccgcttcctaattcccggtgcaattgcctctttgagacctcttttttttttttttcctctccttccttttagattggccaacggctcctttcaaccctgcctcgttggtggccactggagaagcgcggggggctcccccagacagccgtggggacaagttagagccagcactttaccccgggccttgcgtgtagcttcccctcccctactctcggtgccctggtgtctggaggggggttgtgggggtgtgcccgccttacatggtccaccacccgggcaaccctctgg

SEQ ID NO: 71049 - DNA, 990 bp, Homo sapiens
cagccagagcaggtgacccagcggccagaggaaggcaaggagagcctgagcaagaatctgctcttagtagccctgtgcctgaccttcggggtggaggtgggctttaagttcgccaccaagaccgtcatctacctgctcaacccctgtcacctggtcaccatgatgcatgtgagtctgttgactttttcctgggcatcctaagtgataagagtcatttatgtgctcaggacactccatagtgtacagcacctcatcccggcgggcagggggacctttaaaaatgattttccaacgagtggctgcctttgtgccgatttcaggtttggctttctttcacctttgcacagtgcgtcagccccacagtggaggtgaggaaccttgtgcctgaaccctaggaacgactggcactcaccctggctgcccctcccttccagcccagcccaaccctgccgtgccctgggctttcacaagcaggaattccagccccagccaggtgccctttctgaatcacatcagtggaccatgacccagctcccttgccttctgtggtagttaatttcccaggggcctggtgacactctttcctggaggtggtcgcataaactttctcatctacactgtggtactttggggaaatacttttacaggtttctcttaatgactctttcatttgggagtgtatgctcttagagtgaggtctgcctttgcattttgaggcattggagcagcaccaagctcctactaaatgagttctgaagcaggtccccaggctgacatgtgtactttgggctggtgatcactatggtgagagggtatttctttttttgcaaacctctccatcctattactgtcattctgtctcctatggtcatagtccaagggtgcttaggaagctgatttctttacctcatcgacttccacccattagcggtgctaaggaaaacaaatgggattgaaaaggcaagttgccagatacataaaaataatctg

SEQ ID NO: 71050 - DNA, 629 bp, Homo sapiens
gttaaaattctacttattctttagggctcaatcctatctgtattcatgtacctgtctgtggagtcctccctagttcctcctactcgatatgatctcttgcctttgaatccctgtagcactgtgtacctctcttgtggtatttatgtctttctgcccctttttttggttatctctgtactggctttatgcctatggcatggacactgggtaatgttatctttgcattgactcccagagcctagtagagagcttagtgtacaatgggctgattagcctatcagagctatgttgaaaggtgcctaaggtctgctgcagatgacctttcaaaatattcgatgttgcaattacctgtgatgtttacagaacggattgggatcactgataagagatgctttgctggttacttaagatgggctgtatctataagtcctagtcactcttttttgtgaaatttgaatcatcaaattttccaagtagtgataaaaaacaattttagcatatgttaggctattctcttgtgtatctggtagaagtttatgtgatgatggaaatgttttatatctgcactgtctgatatggtagtcagtggccacatgtggctattgtgcactgtatatgtggttactgca

SEQ ID NO: 71051 - DNA, 1886 bp, Homo sapiens
ccagtgatcataacataatcaggtttactgtgtgcctaggcatggtgggaaacacttaacattgattattttatttaatccttctaacaaaactgtgtgggaagtactaatagtagtactggtactattaatagtagtttggtcaagagaactggggctcagaaagtttacatgactggatgtggcttgcatgtggtacatgcaggatttgatccaaagtttctctcactccagagcccatgctgctaatcatgaccttgtgttgctgaagtgaatattttctactatcccattgttgtttaaattgttaaaagtatgaaagcatcttatttaaaattccctatgtctcagtatacatggatgagctctgttgtgatctttatgcccgtgtgttctttgggtttgttgactagcatcatatacctatctctcttgctttctctatgggccctttgctgtgccagccacacatgagtttaccagcttcccagctaaccaggggccagcatgttcttcctggaggcatgcccagccactataggaaaggggtatgacgtgtgcagcaggctgcatgtcctgtgcttggcaaaggctggcaactcccactggggtggagaagggacaggattctccacatggttcccatggtacacttgacaagagggaatgatagtaccacagtgttatgtctgggtcctggaatgcttcatttatatgtacctcagttgacatgtgacttgctcagtcctgctgctatagcctgctgctggaagggctgcctcagtggaaagcatgcatccagggtgtggagccaaaattagaagggccaaaattctacctggcccactaccacagcaaccttgggcatcgttttcttttgatctctagtatctccaactcctagaattccagcctggcagtcttctgcctctgaaggcctcttatccttcctgttcttggctcctcttctctgtgaatgcttacatagcagcgtcagagttgtttgttgtattgtgtctgtacatgcagtgctgttctgtatctctttgaatctgagccattttcttttgactcatttggctgatgtgaatggtactttcctgaagagctatctaccagtgccgttgacatccaagccacagaattcttttcctcacttcggtttgaataaaaccaacatatccttagggatggttttgcacttactatcctgctactaacttggaaaaacgttacatgtctcattcatcttagggaaccgacccagtcccaaaatatgaactagcctgcctcaccagttattaacaaataagatttccttttgaaaacctcagggataggataaaggactgtgttgcagtgtaaccagacctccccctcaccccccagttcccccaacacatctcacatctcactggtggcttctcttttctttttcccttgccttttgtgtcagtttttttttctttcaaatatcattatgggtaatttggaacatatacataatatggtggttacttatatctattagctatttacatattttattctgtagattgtcagctcatggtctctgctgaattttgatgtacaggtgtttcccttgttgatttgtatgagttttacatatataaagagtgttaatcttttatcacttttgcagtaaatgttttccccagattgtcttctaactttttaatgatgcttttgataatagatttggtttacatttttattggtcaaattgattgatttctaaacccccttcagatcatggtaatttcttccattgcttttacacttgaaaagacatttcccattctaaggttagaatgggatttaaaacaatccagttttaaaatagttttaaaaatatttaacttgtc

SEQ ID NO: 71052 - DNA, 2210 bp, Homo sapiens
agaggaattagatctagcataggcagagagagagaggaagaaattacatatgtacagtaggacagtgactctgttaataagctagaaggcagtgggagacatttgagtatttaagaggaataccataatggggatggtgagatcttggaaagctacaattcatcctagtgatgtcatcttatgatctttacagatggagatacacaagagttcacattcacattctttgacataaggatcagagtagggcttttctacttctctagaggcttgagaaacctctgcagctgtcagaagtgttcatatcagaaacaaaagctaaccagtcatttctttttgcttgtagtacaaatggtgactagtgatgcttctggtagttgatctgagctcttcccaggactagaagatcctagcattttagttattaaccacagcacacttactcaataaaagagcagtcatcagtctgagtcaactgtttatacagcctccagcctaagattcttccttatcagctagagacctgggcttaagaatttcacaatgggctgggagcctcttagagaaactagccttttgagactttctctgagttgggctctcttgtttgttgttgttgtttttgaaactgtctcactctgttgcccaggctggagtgcagtggcgtgatcatggctcactgtagcctcgacctctgagttgggatatcttgaaggaatacatgaaggaaaagggaacagagattaaggttttccaggctttgggttgtaatcagacagtttagctgtattctgaacacccagcacttaatgtgcttggttatccatgtgtatgtatcaagggtgggggaactcatggagtgagtcactgagtggtatggtttaaatggcaggaaactcttccctcaccccgccttgggtaagaaaagggcatagcagagcgctgacacacatccctctgctccagaaagtgtacagtacccctctgctccccactgaaaccctaaagttgttcatcttcatgtgtgccaggaaaggagtggatctgtgatgcaaataggattatttggtcatatctgctgactcagtctaaagaagcttttgaaggggatgagatgaaatttcatctatgctgcagagagcaggaggtgcattgctggatggagagaggactgtaggctgcatgtgagccaaggtagacgagggaagcatgggggtgggcatgaggaactggggcagcctgacacgtgatcttggcattgcaaaactgatatcctgttggcctttgggccacatgatatgatgacagtgcagtatccccatggccctttctttttctagatttcatttatgatactctcagatttttaaatagcatgactttccccagggagaaattcagacctcaggtctctaggactgctctgaggtcatgagatagactcagtttgaacctgttgagtttaaatgtcttggaatgattttagcatctcagtaccccctttcccagtgctcatctggtcagctgctctggaacctgagggattctaaactgagacttagtttggggtcatatgcagttaaaaagggacagtcttttggcaccttcacctcggaggtggctgctttttggcttagcgttggactcatcactgaaaaagatagttgagaggttgtttttgacctgagcagccttattaagactcagttattggcaaaggagagaaggctctgcttataaatgttgcagatttaaaggggaaagaggaaaccacagtaagtaaagagcgattcagggagaccagtttctcttttttattcagaatgctgctcaggtatctgctttcctaggagccaccttattgtcaggttctgccttcggtttatgtgtattcttcccttaattcttagaagagggaagatgctttggggttgttcacaggttcccattcgacataaaatagaagctgcctacctttacatatactcagttttatcttctccaagtctcccagaagttctctttgaaagttcctagagcagggactgcttttattttttttccttctcctaggctttaagcatgtatttagatgtatgtcaccattgggtaaaagaaaggctaaagattcagataacttttcccatctgtggaaacatggaaagcagtactcagcagaggaatgaggactgattattttgggcctcttt

SEQ ID NO: 71053 - DNA, 899 bp, Homo sapiens
aattctaagcctggtatgtacacaactaatatcttattggaatgtagcaaggatttccaaatgcagaatcttgaaaaactcaaactctctaagtatatttccttatctgtgaaaagggaacactaccaatctcacaggtggttaggattaaatgagattttaaaaatattttacccaacttctcatacatagtaaacactcaatacatggtagtagtagtagtactgcttcttactgaatgtgttttcggaggcctctgaagatgagtatctcacagaacagttttcaacccccaagagcaccctgggaaaaaagaaagtgtcccatttttcaaaagagtacatcctattaccaaaatgctaggatacaagtagctttgtgagagtataaggatacacaatttgctggactccagaggcaaggagacaccaaagaaaagagataaattaactcacaaagggttaaagtaagtgtgggagatacaagatgggagcaaaatcagagactgctggcagttaggatggcagggttgaaagagcaaggctatgctgtgatgaactgttttcagttggcaagaaggaagtccttatatgcctgatgtccatattttccaagccaaaaactggcataacgtctaacgaacataagtatacttatggacacaatgggacaaaatgaaatcagggctgtcctggaaatccagaatatatggttactatctggaaatggtctgtttttaaaagaacccaaccccagcatgactaaagaactgcatagagtttcacaatacccttatacagtctctagttatgactcacctgaatgatgaatgctcaatgggcacatgaccattaaaaaattagagcatgggccgggcgtaatggctcactcctgtaatc

SEQ ID NO: 71054 - DNA, 1381 bp, Homo sapiens
tatgtgataactcaataaatgttagtttccttcccttttcttccaccaattaaagaagccctgaggcactgcagcattaactactgataaatagctttatgttaagtcctgaggtggcagtaaacatgagcattgacactttcctaagcacaaacttaatgtcatgtgatatctgtcctcaatcgtggaagctggcagtgaaatttgagcccataaaatgccagaattgcgagggctcttagtaagagatcatctagttcaagcactatacttgacagagaattctcaaatgccacaacattagtgggccatttggagactctggcttaataaaaatgagtaggcaaagaagtagctggcaaggtgaatggcagacatctgagggaccattagtgagaaattccaggagtgatttattgtcctcacccctgaaaaagtcccctgtgatatttgacagcttaatcaccatgtgtgtatttatacagggtgaggcaaaggtcactgtacaagagagaaccactagaggaacaggtgttgatcttcaaccttctaaatatattagtcaaagctgaatgtctgcagcagggaaaaaaaacagcatatctatacaagatcctgcttacacttcaattttaaattttaaatttgaaaaaggaccaaattttagttttatcattcaattttggacctcattttcatatgaagaaactatctaaatttggttccctggtgtccagtgaaaggtgggatacaactaaaagagataaataatatctttattattaaggtcccaaatggagaatcaaaatgatagctaatgaaagaaataattggctcatttggaaagtaaataaaaaataattaatttactaacttgttttccatagttaacttcaagtgtgacagatatgtctatttttattgtatggataaagtgtatgtcacagagtctgtctctttatttataaaatgcacagaagcatcaaggatgatattggaaacctaagaggaaaaacaacactgggaggcagtagagcctagtggttaggagcaaaggcttgttattcagtcaagatcaaagtccaggttgatgtaggaaataatcaaacatcccattgacatacacgcgcacacacacacacacacacacacacaccacaaactcacacattccagatacatagaaatgcctaatatttaaagtataagtatagagtcacacttgaaagtaagaaaagaaatctccaagtgccagaaataaagaaaataccccaaatggtatttattttttatgattcatgactcaaagagataagtggaccagatatagttcttagggtctgtaattttaatgcttaaaagaggatgggaatcagagtcc

SEQ ID NO: 71055 - DNA, 1074 bp, Homo sapiens
atctgggccagaatgtcaatagtgccagggttgagaagccctgtctagggcatttgatgcctgtcaagatatttaccttagccctggccattatactcttcactctccacctctgacgatggctttattgcttccacctatgaatcccaggctgaccactccaagaaccagctccatctcagcaggcttctgggctaaggcagaatttatctcatttcccagggtgttgctgctgttactattgttcattgctatttagtttttgacccttggtcttgcgttaaccctaatagaagcttatttcctagttgctaactgttgtatggttaatgactcagcctgcctagacctctggtttttgcaagctgttctagtcctggcatccttcccaggctctgagggccaacttcatctatggtttcagtacaacactgctgtactcatttcattagggaacaccaaatagggtttgggctggcaattacactagacctgctgccttttgaatctctgtgagaaaggtgccagccccagggaagaaacaactcaatgaactatcagctagcacaagagttgctcctcctgtgactgtcagtgaaagctgaggcagacagacagacagagagagagagagagagagagagagagagagagagaggaggcaatgccttctgggtaacaaatttcagaagacttttgtgtcaactggcttaagtagaggtagaaagatgtcctacacaatggtgttttagaggcaattaagcatcaactctgtactgaagaaggaaaaaaagagagtaaattgaaaccccaaagttgagataatgtctggcttggccatttctcaagtgtcagcttcatatgcctagaaaggagtataaaggaggaatttggaacaacaacaaaaagtatgaccatgaaggcagtagaaccaactgctgtttttcaaacaaatctccatccctgaattttgagacttaggtagtattgtagaaagggactggcttctagtccttgttcagtcacacaatgctgtgtgatcatagacttaaacggtgtatgcctcaggttcct

SEQ ID NO: 71056 - DNA, 1268 bp, Homo sapiens
tgttaaattttagaacaaaaagaaatagtgcatataaaatgctttgaaaatcattagtgctatatgaatacagattataattaaccatcacaaaagatgtgtgacctgagggaaaatgaatttggataagatgagaacaagaaaggctggcaaagtgtatcttgttttggcaaaaagaaaaaaagatagagagaaatctactgtctttttctctgtccctgtgaagcacttttcacattcctggcatagtagtaactatcctttttattattattttataaaatctatatgataaaggactccccaacattattaatacactctagaattggtcttttattcaaggaagttgtcttaattcattcacttactgagtagcattcattcagtgctcatgataattcagccaccacggtaactgttaagggcccagagaagaacatggcatgccttctgtcctcaaagagccattagtctggtggaagtttctcatttgagtcacttctgttacaatttaattctcttcttgcatctgacctacatttaatagtctaaaaaaattgacttttggaccttgtttatacaatcatcgaaactgcttggctactccaagttttgactcataccagttactttttgagcctgttaaggattgtgtacttacacaattaagctcgtttcccttaagaatggagaaaaagatccaagtccaatatattggcaatgaacagtaactggttactgggaaaggatgagtcaactgcaaatttttgatgagctaattcatgctagaatgttcagttatggttctctctaggcattcccccaaccctgggtaagatgtggatacctagaaaggaccaaaactgaatctgagagaataaatctctaatagcggacattctcatatcccttaaaatctagtgaaatatatcgaaggcctttgattgtccttttgaatcaccctttgtatgtaaaccatctttagaattctgtctctatctccctatagttcatcttcccattatgcgaattaccctttaaaaaaaatgagctaagtttgttcaagctcagtcaaaagtaaaacacataaagaaataaggctgatggctgtgttaaagagagtttctgtcacaaccctcaaagagacaaagagacaaaatgtttctctgaagacatctaggaggaacagctagtgaaagtcctgtattctcctccctcacaaaaaggcctttctttttatcctccaaatccatcccacctcccac

SEQ ID NO: 71057 - DNA, 923 bp, Homo sapiens
cctcaaaactacctttagctagtattgtgagagagccaagacttgaacccaggcctgtcttcctctaaggcacaggctgaaagttaagttctgtgcctgaagttaatttgtgaaggacatgagatgggacagacctgcttccataggctgattcatctttcaagccctgaaacttggagtcaagcagtcaattggagacctgttttcacataaacatccaatttctcattatttctgagatctgggtggtagttgttgaggatgatattttagctttattgtggatactgacctgctgtgaaaagtccaaaaatccagcagcccatggagaggttgaagagatgccaagtttctgagtaatccacaacttagatcatcagctagcctagaaagaaagatgattgtatctctagttgtttggagctcatcctggggaaagagatatctgattaatggaaattttattccaggaaacagctttacttatattctcagcacttgcttatatgatttccagaaagtgttattttcactttaaagtaatcttcagggtctttaatgatcttttcagcactgctctgtaattccccacattcttatctgaaagtaacaacaggaaacctagttttaacaccaactctaaacatcaagagaggaaggaaaacgagcctattaattttgctttttttgttttaaggcaagagcttctgctcatccaggaaggaatcaagaccctggcctagggaacttatgcttcattggtgatttggggcctagggacagaagggtcctaggtgagtagtccaaaccattttcctctgggtcctaatgagaaagatctgttgtttgggtgcttagctcagcctaattatttaacaaaaataacagagaagaaaaaagtccctgagggaggcaagatggag

SEQ ID NO: 71058 - DNA, 1623 bp, Homo sapiens
cagccactgtgcctggtaaggcacttttatttttcatatccccttagccaactcgaagtaaaaccatctctcaaatgtatcttgacaaaacctggcagcaaacaaaaaaatctcaaacttgtctgtcattaaaagattgtggtacccacgcaacgacaccaactcaatgcttagggtatgatgttttttttttttacccatcagttttgaaaaagttaattacatttggcaattccccattcccttatagtgaggggtctcaagagctggctcctacacataaagggcttagaacagtggctggtacctaggccaccaatagtcttttgccccacccaaccggtgacacagcccggggccccgccgccccctggcggccattacggatttccgcctccctcacagaaggcagtcactgcaacgtgcgtggcctcagttgcgtcatatccggcccttgcgatcagggcttgaggaacccgcgccatgaagtgcgtgtttgttaccgtagggaccaccagctttgacgacctcattgcgtgtgtgtcggcgcccgacagtctgcaagtgagtgagggaggcgagcaggcggcggcttggctcgccacccgccatctccggccatactgccagccgcgttagccttgcctgaccgtcgcgctcggaaagaaacccccgcaactctaccacaggtgccgctgccccttagctggcttctgcccacgcccggcggggcccttctccggctacccggccactcggggttgcctgtttcctcttcccattattccggccgctcctctccctcatttcttcagctccttttccggtctgcccccgcgctctattctccgcctccgcgtcctccgcccctccttccaacggctccgcccctccgagctcgggttttccaccgggctcggcagtttttcctcaggcccccctgtggaccgcacgtcggcgccggcgtctgagccagccgagctcgcctcagagcccggctccttcccctcagcacttggccggagcccgcgcggttcctctcctcagcgcgcgtcgtcccctcagggctcccggttctcgcagttgatcaagtgaggcagaacgggtagtgcctgggttccccccgagtttgcgactccttttccaaagtcttttcctgctgtggctttcgcgggactctgcgagctgggtcgcttagattcatgagtgcttgggaggttcctcgtcgggccccggaccagaaaatagttttgaaaactaagtgaaatcggccacagataggctttttggcggccgtgctccgatgttaacgtcaaactttagtagtggtggtggttcctgctctgttttacatagccagtttaaaaggccctcacattctgatttcctctttcagaaaatcgagagccttggttacaaccgacttatcctgcaaattggtagaggaacggtggtacctgaacccttcagtactgagtcgtttactctggatgtttacaggtacaaggattccttgaaagaagacattcagaaagcagatcttgttattagtcacgcaggtaaaggtgcctaagaatctcagggttgggtcttttaattttaattttttttaagttctggggt

SEQ ID NO: 71059 - DNA, 1773 bp, Homo sapiens
ccctttatcctccccacccctgtctccaaaaatgtccaaccctgagctcttccttttcccttctttctgcgcccggcttccctctgctcctgttctttattcctccctttggggtggctgcgagctgcggacaacccgtcgtggttgtgatgtggggtgtgtgtgtgtgtgtgtgtgtgtgagagagagagagagagagagagagagagagagagaaagagagagagagagagagagagagattgagacaaccgtggtaggcaaaagcacccctcacctcccccagcccccgggccgaagccactctcaatctcctggcggcggggcggggcgggggaggcggggaggcgagagggaaagagggaggacggggcaggcggcaggggcagcagctcctgccttctttgcagctccgcggccaggggtggaaggaagccgcagccgcagccccaagtcaacccccgctgccccgtcccaccgtctcatctctcccccctcggtacggaattttctgtctcgtttgtttgcttccccagacctccccctcccctgggtggtggcagagacgggaggggaggtgggaggctaagcgcgggtgcgggtagaggggacaggagtccctcggagcatatggctagcagagtctctctttgccccttggcctgaatatcccctgctttgggcagtgacctttgcccacccccgtcagcctgggctctgggccggtggtggcgaggctgctccggcgaccataggtcattcaggaggaaggggagttgaacctgggggagtaagggcggcgggcggctggtaggacagggagacagcggagcgctgagtcgccagggactgacctggggtcctatggggcaggcttggatccctgatagatctagattaatctagttggagctacctaattctcccatccgtgcccctctcacccatagggtcgatctcccaagatccagcctagattgatacagggagggaaagtgatattgtaggatgggggcggggggctaggttgcttagtggtatctgttgtggagggagaggggcggtgtcaccggacacttgggccactctttgatctttacgccttcctttcacatgaagcacctctccacttctttcaccttatagcctggcgctcagaatgtccaccctcttgagcccaactggaaggggctaaatagccccacccccaccacaagcctgagacttctacctgcaacctgcaggcgcataggtccactagctggcagcatttcatggcctggccgcacagccccaaatattggctttgtcttttatctcccttcctagcgctctcaggaaaggggcatgtgagtctctgcctttctggacgccgggctggtacctgaaaacctttccctacccattctcagaacaatccctagctctgagaaaactccactgtacttcctgttgctctttaaccccctctgcacgccctgggagcctaagtgtaagctcccgaaaatgccagaatcatctcccttgcctaaatggccgagtgttttcattgcggagcctgtgaagctggtagtagctatgtttagtggaagccctaagcactctcctcctagcctaccttggaaaagtcgctcggggcaccaagcaagacaaattttccccttgtcgttagtcctcctagtcccgaggcagtccaatattctggagagtatttagcttttgtatgggagcaaggtattggagaaaagaaaattattaccctgggggatgaag

SEQ ID NO: 71060 - DNA, 789 bp, Homo sapiens
aattacctagagacccacaagaaccccaggaggtaaagaagtaaaagtaccatctagtagtggtacccactagcatctcctcaccgaagtaggacgggaaagcagcgcacactctaaccgatttaacttgctgcacatccaaaaaaactcatggcgagctgcaaagaaagtagaacacacgggcattcccacacgcgcctagatcgattcactcacgccgagggcacgaccaagttcatgccaccatggattcctgccccagttccccgcgaaaagtaaccacgcgtctcctacccctgaaggcaaagaagacaaggtgacgactctctgctcgctcaagtggcttcggtcccgggccagcggccagggatgggcaggggggaagccccaactcccggctgctcccctcctcgctgctccgtccgggctctccttggtggcagcggacaggcaggataccgggccagagggtggagcagcggatagccggaggcgagactgactggaggtggtggtagttgagggggaggcggagagaactaagagaagaggaggcgaaagagagcggagatggaggagtaattcagggggtctaccagtttaggcagccagaaagctcctcggaaggaaggggcgtgactgccaaggcagctcctgggcaaaggatgggaggtaggggagggggacgaacgggtggcttttcttcttgcggtgagcggctaggaccgccccggagcagggcggcgggaggggtggacgagggaggaaggcggagtagagggcggggaa

SEQ ID NO: 71061 - DNA, 1847 bp, Homo sapiens
acataggtacaattattatccccattttacagatgaagaaactgaggcttacagaggttaggtaactttaaccaagcctaaacagctagtaagtggtggaagtgattcaaatctaagactgtgttactaaaagagctgtgttctcaatcactctgccacacggtacaagagaggtgttagctagaatgccttcaggggcataataataattatagttaatgctgttgtggaaggcttattatatggtagaccctgttctaaacactcacctatgtcaactttaggctctgcatctcacactctataaagaaggtgctattattgggcgcattttacagtaaggaaagtgaggcacagagaggtcttaagttcacggaactaatgaatggtggagcagggctacaaattcaggcactctgactccaaagatcatcctcttagctgctaagctatgttaaggtaaaatgttcgtttctgtgtgaggaagcccagtccacttcgagagtcagctttctttgttagaaagttgtgcctgcagctctaatagacttctcagaagcaaacagaagggttcaagagtccagctgacagcagaggctcttgctcaatcctttcccagaatgcttgtctccattaccctttaacctgcatctttgaacaaattgatatatggggagttcagcaatggcagatctcagctgtgcctttaatgtttgatatgtctgctagcacaccatgtttttcattggatctaaaggagatctaatgagagatcatttcctggtaacacattgtctgctttcaacatcactaggaaagcactttgctgcaaacaatccctatgttggtttaattgcctttgaaaaggggcacaagagggagcatcaactcttcagagtttgggtctgatttcctgaggtgttccatttcagaagaggcccctgacaacaggcagagaataaaaacaagtgtggtctagggcagacagtgtttttcaaacagttggccaaatctctcctggcagccgggaagcagctgaatcatcaaacactaggcctctaacgagatggaggctgggctgtattgaagtgcattccagactgactgtgaaacccagagctgctgctgctttcccaatgctggctcccttccaaggggctggcccagctgagctgcttgtcaaagcttcattttgtctcttctctctctttttttcctcctctttgtgatttcccatgtagcatttgcctgctcttggatagaatatttggatgaattttggggtcacctcaggtacagcctctgctctgcaagctaaagttcatgaactgtgtttacctgttggaaagtcagaatggcagaggggaaaggcactaagctagagcactcggggaatggacaagtggacagacattcttttctgagaggcaggaatgacctagacattctgaaattgaaagccagatgttgggataaaactctagactcaatttgaatcgtaggagtgttgacaaccttgatgaaatcctatgactaaaactttctagagtagaggggaattaatggggcctaagtagggtaacccaccttgaaaataaccagatccctctatttatatcagaaacaaatgtttggactctttaagtgccatggtctgaatgtttgtgtctcccccaaaattcatatattgaaacctaatccccaacgtggtggtaattgaaggcagagcctttaggtggtaattaggtcatgagggcagagccctcatgaatgggattagtgcccttataaaagagggcagagggagcttgtttggcccttcagccatgtgaagacgcagcaagaaa

SEQ ID NO: 71062 - DNA, 494 bp, Homo sapiens
gtagaagtttctctttcctcttagaaaaattggcagtggatgcagtggtggaaaaaccagcagagttagaatgggagatattaagggactggataatggatgtgagaatgtgtgggcaatcatagcagagaagaaagcgtgaatggtgaggaatttgatagcctgtttgaggaagaagaggaatatggacattgacaatccactgctcactttttacccagaggatggtgtcattttggtgagcaagagttaattcattcagtcactgtgtaaacttggacaagtccattcctcttaccttatctgtgaaaaggagggtgggaacattcctactgccctctcagctctaaaaaccacaagactctatcaccaagctgacaaagtgccaatgattttatcctctcatttgtacagcttttaaggcaggagactttctgtgtctcctattgggtagattttattcatttactctagccagtgtaggtaaaaaacta

SEQ ID NO: 71063 - DNA, 3913 bp, Homo sapiens
actgaattctgacatcctcagtgatagtggtgaatgaagacttttatcaaagtatagattctattaagcttttaaaaaattttattaattttttttgtagagatgaggtcttgctatgttgtccaggctggtcttgaactcctggcctcatgcaatcctcccactgcacagcctcccaaagtgctggattacaggcgtgagctaccctactcggaccaatgtaagcttttttgaattaaaaacaggaactgtaaatagcatatacgtaggattcttaatatttttactttaaattctagaatttgaaaaataaactaaaattgaatacaacgtaattgagacaaatatatctgcactggaaaatttagcttacagagtcccttcatgctattgctcagtctgtaattttaagtttaagagcaggtggaagctcttcagcggtgaccgacagacaccataaaaggtagaaaactgaaaaagcctatttcctgtatctaaaaattttttgtaaagaattccagaagtcacaccaaacctttggccaattactgaatgctagaaatctcatttgggagcttactgtaaatgtgtgtggcaatgcactggctccatgttcaatccaacgccaacatgttgaaatcagtatttttgtgctggcccaaacctgaaccagtagaaaatctcccataacagaaattcaatgtttgtgaaagcatgattgccctcccatttctttttcaccttcctgtgcctttcataagttcttccagttggttaatcattaattaatatttaacaaggctttttcctcgtgccaagtcctctgctagtctagcctttaggcaatatatgaactccccaagttcttcccttttaagaagccttggcactcactacggattaatttctctaaggaaattcataatggcagatgaaataggggttccttttcaagaacattccattttaaagcctctcagcattttttcctggtacatgtaaaatgcgacttaattgaactaattttaaatgttgacagaactttccaagcacacatttcctcaacaaaatggttacgactggaacaggaaagggcttagactttttcttctacagctatcccacaagtcagtctcttgacctgaccctgcaaaatccctcaaactctggctctctgagttgattttggatatacgatgaaccataggtttggaatgcagataacctccacgtgtattaatgaaagaggtcagctatgacgtggaagccatctcctgggcagagaaggagaagaaatggcagtctggggagtagtaacatgtctccaaattttctctggtgaaaggagactgatgagaattgatacccatttccggtcaaaagagtggaaccaatgtacttccaaccacctcctctcaacccctctccgcatggacaaacataccagacaggtgatgtgggctaacaatttacttggcatgaggccaaaggcttgagggccctgccctgcccatattcttctcccttgacttcttaaggaaaggaatgattgctgatgtttccctctgcaccctttggcacctggactgattgttgcagatgtaattaggaatgttccccaacatgccgttattcttctcacgattctgggagaaactgtacccctcccccatagacttatataggtggcattcaaattcttgttcccaactttttcatctgtttattaatcccacaagattgtgtgaatgtgtactccgagccaggcacgttggacttctaacttcctcttagcccaagtaggaaggggagactcaggcgctggggaccattctcctctccctgcagcagagttgcagtccctatccctcctgggtgcccatccccgtgcctattttcctggatccccacccagttgatgtgacaggctcgtggcccaatccccttcctggttcccaggccgactgctagcaccacccgagccaatggcggcggccgaggggcggagggggctggcaggaggggagggagcgctggctttagagccacagctgcaaagattccgaggtgcagaagttgtctgagtgcgttggtcggcggcagtcgggccagacccaggactctgcgactttacgtaagtgctttgtaggcgccggcgggcactaggggagcgggtttcctgggcgtgggcaggagtgggtcccggggagagcatctcggttaagctcagcaggaacgtgcggcgcaccgtggggcgggggttgggggagagggaggtcggagaaatttcagttggagccctcgggcgcccgggcgatcggtcgcaaccgaaatgggtgtgagtgacggggagtttccctactagcatccgccgcagacacgttttctgcacttcactgtattaagtggtgttttcttactagttgctcttaacttgttgccagtcttgggctggagtcctagacgccagcccttgccctgattcccctccgcggctgcggccccgaagtggaaagggagcgcacaacttccctctgtcgtccttctccagctactgccatcccctcttccctcccgcccggactcaggaaatcccggagccagcagcctgctactcctccagcccccacacgcccgcctcgggtgacctggctggcttaagccgaccctggggctctggagagggggggccgtggccgagggaaggcacgaggtttgggttgcctgccttctgcctgcttccctcccttgtccttagcgagggcgtcgcgaacgcacctagtctccctatgagtaagcactttttttcctttcagtaggagaacatctctgggctagtaggacagtacctttccgttctcccctggccccacaccccctgtccttttttcagctcctttgactttgcggccccgggcgcgcggtcggggcggcggcagtcccggacctctcccgactcttggagagagagaggcaaaggggcgacgggagggaggtaatagtctacccccccgccctttccccgcacagctgcacttgcctgtgtttacttttctccacccgcagtacttaagcgctgtaatgagaggcccggggacgccgaccacccccgccctggcttctcgccagtcccaaagttgctgccgccgtcgctgctccagtgtgctggcggttccgaccgccgggctccgggacgtaagatgatcccagcccgggaggtggagtgggggttaatggcatctgactctagccttatgcgatgctccttgcctctcacctgagctgcacgatatccccagtggtgcagaaggttgaacttttgcagaaggttgagcttggagctaagtgggttggagagcctcgccatttagcgtcagacagacgggatgctgggggcgcccggcctgttaagagggattgggaggagggaagggagcctggctaacagtaggtagaaaatgtagggaaaagtaaaaaccattgaggggcaagcacttactccactttgctggatgtcacaatggactggggagcctaaacttgatcctcgagatgcagttcatggtgaattccaactaagtggctggagccccacacataccagttggaatcacgtgccccaagtctctgatggtcacatgacgtctttttactttaaagctggaatgtaatggttgaggcccatattccaaaaaccacctctacgtttgaaaaaaaaaaggtggggaggagtgtgaactagcttctaatcaaggaagtctactaggattttggatgaggggaccagaaagggaatttggtgctcagcttttatccaaaacaaaaacaggagctgtttttaaaataagggattgaaatatatgtgagctgggacatgtatctcctctcttcttcaatctcatggtttttctaa

SEQ ID NO: 71064 - DNA, 1809 bp, Homo sapiens
aactcacacgtgaaaaacacagggtaggaagcagcagttttcatctagtaggtgtaagaaaaataaaaaaggaatgaaggtctgggctttgagatgtcctccttggtctttgggaaagtgcagaccagggaacacaaaccaaggaaggcagaagctggcaaatgacatgacccatcctacaggttttccagaaatcacccctagggagaggcagagacaacagaaaagagctatgtgtcagtgagcatgcgcctggttcttggcaaggcacacttgcttaatgggagggtgaatgagataattaatatataaaaaatgtggatagggctgggtgcacagggaggggcacagtggggaagatgaggaatgactaaatgaaacactggtcaatttggcagggactcctgactctgagtcgcagctccctgagtacaggtggagaaggaagcaaagtccattcctgtgtattgctgtatgagcaatcatgttggagtggcatcaaagcaaaggtgaagatagcagaaggatgtgaaacagaaatgaatgcaagggagatgggcccgctccaagacaaaggtcccgtcctttggaacagggacaccagaaaaacagggttgcaagagtgggtggcttctcaaggtggttgggcatagcattgcttcaatcatgtcaaaaaaaaagagaaaggtttgagtatgggcccacagggtctcaagcagcccgtcttctcccagagattggaagaacaatccaatgccagccaccgcaagcaccaatggccgtagaactccagcactgggaagggaccttcactgggggtgccccatagccaagaaagcctcccaggccaggtacacctctagggcatctggccctttgctcccaaggggcaccaggaaaagggccgatggccctgagctgatgcttcctggcccagatctctgctagtccctcccagacatggccgccaccaggctccccaaccaagacttcctgtgcaggaccagccacgcatcctggtgcctatctctggggcttccacggcctgaactggccacagacccacttctgtcaggcctccagagagctcagatctgtccgggcaccagccctagtcctgcctcctcccccacagcactcccaagccactccttcccaggcaagcatagggaagggtgtgcaggattgacaaatgatttcctcttgatggcagtattgctccagagatgcctacctgcccttcccccaggtccactccctccaccctttgctgaggaaaaaacgccaacatgctccacacatggccgatcacaatcttggccactttgggccagctctagcccacctgtggcaccctttccctagggagactggcctcagcggagtcctcctagcctgccttcctgacaaacaggaaagcagtcccctcggaccgccctagggttggacttgacctaaccacatccctaactatgcctttagaatgggaggatggtggagcgctcaggaaaaagacaagagactgggcacagagttgtatctaagccactccctgcctactgagagacatttccacttgggtgttcccatgagtcactacaagaccagcttgaccacaaggtcaaaggcaaccagcatcccacaggccactggggtggactaaagagtaaggtgaacgtacaattttagaacagcaggattgagcccccggcttgtctcctggggcagccccatggggtacaggcaaagatagatgagacaggaggagtgccaggtgccaccccaaacacacctgggctatatcagtct

SEQ ID NO: 71065 - DNA, 1270 bp, Homo sapiens
attaccactatcttttgtaatttttgatacttatttaagaagcttcattctttctttttcttaataatcatggccgtttcagatcctcccatttcacagaactgaaaaaagatgaaaatgtgagcgagcccctgaaaatctgggggggggggtctctttccatgtctttaaatgcgtacgtagaaagggagctgtattgcttttaggccaaaatttcatccgaggaaatgtaccctctttaggggtacattcaagggagcccagcacttgtgagcacgcacggcggccatgaggtttaaccaccactcagtccaaacccacagagcacgcgcaccctcctccagccacgtaggtggggagaactcgagtgggtgaaggaatccgtgtgcgcacccttctcctcctgttcgccccgccctttggccacacagaaacgcttccaggccaaccgacgaggaaggctagagggactctgctaggaggctctccctacacttgccagaactgaaaacgtaggcaggggttaaaaactcagtgctccaaaaacgcaagaccccgacccgcccacatggccccgactcggccctcggggactcccagataactgcctgacgcccgagccggtggtgcggcagccaccattgcgcaagttcgagcgcccggctctggctgctcacatgatggaggatggggaaggtcctctgcaccagaaaggccgcctatggcacagaacccctgccctacttcccccagcgtcagggaaaggaaaggcaaagaaaggaaagacgaaggaaggagacctacctagctgaggctgcgcgccagcgggaaaggtccgactacctctgatctgcgttctggggacggctggaccccaatgcgccccctgcggcaacgcgactcccgcgttgccacagggtaggctgccatccctccctccatcttctgtgtctcctgttccccagagggggtggaagctgaaggtcagaggaaggggaggtgttgggaatccgggttgtgtggtgtcggctccgcccaggggaggagtgggacatcttaagccagtcgtaggtgcttaaagggccgggagaggtgggctacggaaagtcaggtgggaaatctttcatcttggccagttgctcggtagaatctatttctttcccttagaataaggtacttgttgctagggggcaaacgatgattgagtcagaacaatacaatggaatatctatagttcaatattcgcaaaacatttagacgtaaaagaaat

SEQ ID NO: 71066 - DNA, 948 bp, Homo sapiens
gcctgtttgctgcctggaacactgaagggttgttaaacagctctctgccttttaaaaagagtgggagatgattgggaggcttctagactgaggcaaaaattgaaaatatcatgcatgtttagctatatggtttattaactcatttgctgaagtgtgtacttgatttctgttaaatctttttatgcttaggcatttttgctattgagagacttttcttttgggtatttaaatactcaaataactcattcatattcaaatacctcctttaacacatttctcatttcctttagaagcaaaacatactctctttgcaggaactgttttcagccccgccccgacctctcaaaactctgcacttagccagctgtttccatggccaatgctgtaagcccccaggcccgattcacgtggcaggaggggaagaacagctgaagctggagcagcgagctgccttagctgccaaagtccacttgattctgacgcaatgcaactgcattctccgtttttaatttgttcctgttctgcttttggttttcagtctctaccactatcccctcactctccagcgtctacccaccctttcctcttttaggtttctgaaaaacagaccatttggttgaccctgcaaggcttccaatttgcctattttgtcatgatgccctgtttctccccatcatgctcacacttgcttctaaaatgcctctggctcttctggtgagctgctgtctacctattcctgtctctggctctgggtcctgttgtctgtctccagctgcctgcctaacacaaactgccttactgcctgtggtgtgtcatggatctgctgattttctgtggcacctgaaacaatagaagctgaaaaatccatgacttctgtttaactgtgcttcttcacagttttccttattagacattatgtggtcaaaactctgaaactaaactctttaa

SEQ ID NO: 71067 - DNA, 905 bp, Homo sapiens
ggagaaaaacttgagagttttatggtttcacttaaaatggaagcagaatttggaatgtatgggtggtatctaggagaaagaataagagtagtgtaggaagaaatcagacccagagaaatatttttttttgtttctctgtttccatctcctccagcaagataatctattaaatgaagcattcctattatttcatatattggtaggttaaaaaagccacatagagttaattcattgggccaatatttaggatagctgcaaagttcaatttgatttcgatgaataggcaagcttgtctttcccctcacattaaccagacatgcattctttcctttctcttcttctcaactttatttcctttcctaatttatgtatccatgtgatcattcaacaaatacatgttaagcacctattgtgtaacaggtactacgctatgtactgagtctacatatttgaagttcaaagtctaatggactttgtgctccagagtatgtgagcatactttctggaggcatttggaaaatttgtgtcacttaaccttaagtgtgaataatctttgatccagaaactgcacttaataaaataataagacaaagctatttagtaaaacattttaaagtggtttaaaaatagaaaaaaaaaaaaccttaaatgttgacaagtagggcgttggttatattatgcagctattaaatcatataaattagtaaaatttaactacatggagatattcatatattaagtggaaaaaacaagatgcagtacaatatatatggtatgatctgaaaatgcgtatgtaatataaaaagagaaactagcaaaaaatggaaagactacatacaaaaatgctatcagatttgagtggagagattataggaaaatatttttaaattttccactacctttat

SEQ ID NO: 71068 - DNA, 736 bp, Homo sapiens
tgaagttacaaaataattcttccactaatgtgggtcattacagcttagtccacagtatattccccaagtactcacaaagcctgtcagatggtattctctttgtagggtcactggcagttgggaaggtacttgtttcctgcattcgtgccttttttattccttctaaacatctgaagctgagcataaatctcccccttctccctcctccctctgcaatatctcttgccccaattatgcagttagcctaagaatcaggaaactgttccagaaataaacttaacctgctgatctagatagtgactaaatcctccaataatgtggacatctactagaaaagctaggttaacaggcttcttttttagaagtcatctgtttggttgtgagataagatcaaggctcaatcatatccaaagtccaaaagacttcaaacattacgtgatttttgccccactccctatcactgcagtgcagttataactggttctggagttgagaaaaagccaagcaatcttaactgttgtcaattttataccattgaaattgtgaagcaaatatgcaaattatattaaaagcctcccaaaaaagcatgggtaacagtgacattttttttcccaccacaatctcaatacacatcacaagtacttctactttactatttcttcctccacaaacaatccaaatcccaccacttacttatactccatgatctccacaaagcccttccttccataactac

SEQ ID NO: 71069 - DNA, 1041 bp, Homo sapiens
caatgtaatggggtaaagccagctgaagaagacaaaaattagtgctcgaagctctacaaaaacatatacaggccctggattccaagattaaagttctgcattcattcaataaacatacatggtacatcaattatgtgtaaggcatctgctatgttctgagtgttgatgtcccaccaaaatacatatgttgacatcctaacccccaaggtagtggtattaagaggtggagcctttgggaggtggttaggtcacaggagcagagcattcatgaatggaattactggccttataaaagaggccccagagagactactggcccgattctaccatgtgaggacacagcaagaaggcaccatctaggaaccaggaagtgggccctcatcagacattttatctgccagcaccctgatcttggacttccaaagcttgcaaattgtgaacaataaattcctgttatttatagctactcaatttatagtatttttttatatcagccagaatggacaaagtatccttatggtatctgagggcagcaatatactcacagaggctatcttacctctgttaattcttcaccaagatcgccattcatattcctcttaattaagttaattaatgtttattgaaaacctactgtagtaaaaactaaatatacaaacagaaagaaaggaaacaaaaatacttttgaagcagcttaatctttgctttccagtcaggagcctactttgccctaccacaaccctgtcccaaacacttgtagtcaggtagccagtgtttacattgttgcatcatccaagaaaacaattgagtaacccttttatgaatcatggaacttgcttacatgatcatctggcttgattgacaaaaccattttcttacaagttttttcctttgattcagttccctgactcatctcttactatgctgttcctagagcagacaccttattgggccaaaggctttacaactgtatttcaaaaacatctaaggttcttcaaagatgttatggtgattccaaaagcattcagtttgaattacaat

SEQ ID NO: 71070 - DNA, 826 bp, Homo sapiens
tttataaaagatctgtatttaaaagaacatgaagtcttctgtaagaaaatatgcatctcctacttcgccaacagtaaaaaaacataatatatattttgaagtacatacaaaggactagtgttgataacattaaaatagaatgtggcctacccataaatacacattgtatttcacaactccctaccttctttaatcatcaccgtctgaaatgtatctcgttagtacggaaagtacagtggcctttctgtcctcttagtttagttgccaactgcaacccaaaataagcatattccttggacaggaatacccaaagcatttaatggactataagattcttgagggttttgtccacctctatatccataataattatgacttactggtttatagcaggaaaatatttattgaatgtctttgcccctcctctaattcttgtcccagtgggtgagagtgggggttggggtggctgacaaaccttgaaattcttttgagaacattatttgacctcgggtccagtttcagtcatcagcagtagtaaccacactgcactgcaaagtccaatcgctgtgtaaaaatagccacatggaacaagagtttgtgaaattattgctcaaggtagctgggcatggtggctcatacctgtgcctataattgcagcactttgggaggccaaggtgggttgattacttgaggtcaggagttcaagaccagcctagccaacatggtgaaaccctgtctctaccaaaaactaccaaaattagccaggcgtggtggtatgtgcctgtagtcccagctacttgggaggccaaggtgggagaattgcttg

SEQ ID NO: 71071 - DNA, 664 bp, Homo sapiens
cccccaaggacccattcacctgagtatctctctagcgactgcctgcctccagactctccttcagtgcagtgtcggttttgccttcctatccctgcctctcaaaacctgtttatacctgacatcaatttttatttaccacatggtaattctttggtaaattcaagtagtaatcaatgggatttttaaaaaatttactgacaaccacacccccacactcattctccctattattggccttccagctcagtgctgggcaaagtggaaaaagaaactgtttcatggtaggcttaggtcatcaaggttcaatgtccagactctctttatttccctctgagttctttgtatgcaattcatgtcactaccaggaggttaatggttgactgggcttatttatggtcaaggatcctcataggaatgacgaatgaacctgagactgcaatttacttctgtttttacataagacatacaagttaattattatactttgtaactgtaacaaactctagttactcaatgtaccaagtgataaatttagagcaacattgtaaaaaatatgaatgtttaatctagtccttgaaggatatcatcctgacattagtaaaataattattcctgaatcttagtcatttgaaattcattttatatctgagcttcagttgcctca

SEQ ID NO: 71072 - DNA, 430 bp, Homo sapiens
caacttgcagcctatagtaaacctgtgaagaggaatacacaagaacaatttgggggagggaggtggagaagaaaggaaaattaggcaaagctcttggccaaagctttccttatctcaaaatatcttctcctacagtgaaactctctctctctctctctctctctctctctctctctctctctctctctgtaaccctcacccccctcccacattgtttgctctgtaccagtgccagaaattccagcaattacaggttcatttgagctaacaagaaggctgttaaaattaaagtaagtacagctgccaggatgaggtggctatcagttattcacacattggcatgaatgagttgagtcaagtttcttcaaatagcaaagagctgttgccctgagggaatgaggcaggctggaggtgagagagagccttttag

SEQ ID NO: 71073 - DNA, 1075 bp, Homo sapiens
gcggctgctggagcccctgtgacttcaggaccctgcctcaccttgctcgccgcgtcctggcgtcccgccgcttgtccgccgggtgctgcgctccgagggccaaagagggagtcgcgcggcgcagccggggctccctcctgctgcgaggcaccagcacccgcaccttcgcaccctctgctcgccccgaccacttcaccctgtcctggcgcaggcggagagcacggaccctaacccgaatgccgctgcagttattttcaaaagtccccgttccaggcttcccaggaataggagctgagctactgcggccgcagcggcagagcctccgcctgacctcaccagggtgtgggggggctgctgagggaggggggcgggaacccagttggggagggagggggcagtgggggggggagcgcgcgggcgggggaaacatggcggcgggggtggccccggcggcgcctgcgcgggaggcagggtggcggggagccggggctaggacggtgtgtggggtccgaacggaactcccaggctgtagcgaaagcgtgacagggccggaccctgaagctgaatgaccgctaagtggccctcacgcctcggaaaccgggaggctctggtgtgagcccacatggattctagtgccgggaggcagaaaaagtgaaaagtgtcaagtatccagggacaacagtgcagccgccccgggttagccactccaaggaggtccacccgtgcattctgccagccgtggcctcggcctcctcatagtcacggcggggcccgagcaaagggtgtgccctggaagcggtgccacctcacctcagtggggcccacgtctcaaaataagcctgacccaggctctcacacaaatatcactcttctagtgggataagcgcttcatccctccccctccctgctgcagtacacaacattaagaaagaggaaggataaaaactacaaataacagtttaacattttactgagcgtctgctatgaaccaagcactgaagcatcaacttacctaattcacagctactctacaagttacacactattgtctccattttacaagtgacaaaactga

SEQ ID NO: 71074 - DNA, 816 bp, Homo sapiens
tattgacttcttaggaaggaaagtaccagagtcatggatgaggggatgattgatctccacaactgatctatgtagctcttccacagtcgcaaataataaagatgaagagctctggattgaaaaaaagaaagaaaccccagctcttgtactagctctgccactaaatcactgtgtcactttccctccctaggcctcagtttcctcatcagtaaaatgaggactttggtggatgagatctctcaaatattccttctagctctgatattctatgagtctataaaacccacattcatagccaagccactcagtgcatgtacatatctgaaacagttaacaaccaccaccactgtgtaagcgaatacgcagtcagggaaaaccccgttaaacaaatggactttactccatattctcattgtcaacagagaggagaaagagttcaaattccaagaaacagcaccacttcaccctcctcccaccccattccaacacaagattattctttagcacttcaaaagtcatatcagagattgtcacaagtccagatccaatctaccaaaccccacttggcatgttggcagacgtgggaaagcattgaacggaatgtggtcaattactattaaagatttagatatgatctggatttaaatctaccatggtctaaacaaaaagttaagagaacacaggcccacataggaaggtgagaaagtccacatgggaaaagaagtggatgcctgctcagtccttggctccgcttcagttttctctgagagcaacagcatttctttctagatgctgtctggccacacacccacctga

SEQ ID NO: 71075 - DNA, 3241 bp, Homo sapiens
ccctgattgcttgacaaagtctagagcccctttccagtttctctgagaccatacccctggctccaatccagccttttcttgaatactaattgaggctgcacgaacagctcaaaatgcctatcatgatgtcagttggagaaataaatatgctgtgtgatcatactgaaagtcaatgttatcaccttgatggtcaatgacccgtggtttaagaaggaacatctcggttttttaaaaagtacctttctatttttatcaccggacgctgggcagttgaggatcagaattaagccattagctcgtaggcttgcaatgatatctgctcaataaatatttaccatttagctgacgcacatcttgggcagtatgtaagaacttctctcacactgtgttggcagcgacagacatgtgcggagaaaaagtaaccggaggcctaatactggctcagctccagcaataaatccatcattacaccatggaactggcacactccccgtgtatatctcaaggaccccaccctctggccggcaggatcatatctagggatctcaattagagatctcgtagtgaataagggcgagttattctcgtaacgccagaggtggtggacctgccgacgccctagggtgggacattccgggcttggatagtaagacatcgtaaatatacgccaaaatgtccacaccaacgtttcccgagagtatttctttacaagtaaaagaccgactcaaaatcacccctctcaaaacgcgtctctttggaactgcagagttagggagtaagactttctgcctgaccccacctacgtcggccgcgcgctctcagagccagggcaccacgctgctcctgcgcaggtcctagactcctcccttcgggaggctcaccccctcccttctcggctacttccggccctcaccgaacgccctcaacgcgcttgcgccgttttgataggcttctcgggccgaagtaatcggagcgctgcctctctggaaccgcccccgccacctcttcgccccgcccacgtattaccgcccctccgaaatctcgcgagggtaggtgcgcgtcggtattttgcgggcaactagctcttccagctgctgtaaattgctgctgcgggagaaactggagccgctgtagccggcgcgcccttcttcccttactgcgaggagccaccgcctctttcgcgctccttatacacctatcactgggagcggtggcagcaacattccctggaccaaccgccgcctcttcaggcggccgctttgccggtcattcccgaagcccggcaactgagggcggccccctttccttaacagtctcctcgctacagatcgtctgctccctcagcctcgcccgagacccacttccccagtctcgcccgggtggaggtcgacgaggaggagacaagagtcacccttcctccaggcggcgccggccccctcacccgcgggtgtgtcctataaatggcgtcggaaagcgacaccgaggaattctatgatgcccctgaagatgtgcacctagggggcggctaccccgtggggtaagtgactgcagctatgacaggaagccgggcatcccaagccccccgcatctcctgtgtcttccccctacacccctcccaggtcccgctgtgtccgccaccgctgttcctccccgtctcactggaggacttcagaacccagacctggggcttcttagggcggggtgactcggagaagggggagtcagccacctcgggcagcctcccggccgtttccctactgaacggtcccagggtcggtctcggagcccgtttctcttctgatccagccttctgtgagggggaacagcttacgtgcctgagtcggagatttgtatctgtggggttctgagcttacctttcaaacatccgttttggcctcggggaccgtagattaaaggagcagtaacaggagaaatgtaacttgtagttttttattctcccgtttaccgctaacttacctattcacttcagaggtggctgtaactctcccctatttgccgtcctctttttcttgcacacagcgaaaaggagcggggggaaggttgggtatttgcttaagaaagtcctctagcgaatgtactctagatcaacagtgttttattaaaataacaccttatcgtgaggtaaaggaaatcgaatacacggtccctattaggcagaatgcggtctaaaaggatggccagacagaagaaatgtgcacaactgactgcagagggacaaacaagtgctgagtaatctggtgattggaaggagagccccagctttgtgttctttatctaattctgcaagatgttttagtggtgattaatatgggtgattctgaataggaagtacagtagttggaatgctcgcttgactaggacttgtatttacttacccacttctccacttttcaaagttggggtagtgctttaaagcgatttcgccgaactcccctacgaatgtacgtggaaatagaggcagtgaaatatattttcatgctgtaagaacttgaggattggtaaaatgtagatgttagtataaaggactaatatggttcgagaagttcactgccttcaattctcacacttactccgtgggagtaataacccgctgtgatgcaagtatagttagccatgcatgctagaagtcattctaaaaactaatgtatgtttatacacaatatgcaccaaaaagttacagtaataaaatcagaaagcaatgtacgttggtagatttcagatgtttgtctttccaccaaccttcatgtcactgttgtgggattttggggtggcagtggccaatcttgagatgacaccgaatctccttcaagttcaatatctgagacaagtttagagctaggtgtagagcataggaaatacatttgggttttgaaatgtattggacttccgtgaaacttaatttttgtgtgtgtggttttcccttcaaagtaatgaactgacaattcagattgaatgagacaccaagtcctttggtacttttgtgtgtgtgtattggggtgggggagggaaatcatcagtttatgagctgatcagtttagaactactctgtggatattgttctttccactgaataagtttaatttcaaaggacgcaagttatatcaggacctgtgtaaactgtctagtccagtacctgggcacagagaaagcattcaaaatgttcatgcttttctccttcctttcttggcattggcaaatttgttaactttacacaaagctt

SEQ ID NO: 71076 - DNA, 542 bp, Homo sapiens
ctcaagtgatctgcctgcctcagcctcccaaagtgctggaattataggcatgagccactgtgcccggtccccaaaaccctttgctttcgtggtcaccccttttccaaatatgcttcagtttaccagtaaccctattaaaatacaatgtccaaattatacactttatagtctgcccagtggactgttaacttctgcccccatccatgttctgtatggcccaagatcacctttgcactttggctggccacgtaatattgttgggtagcaggttaaactgtgtcatttacagcttcctctgcaaattccccctatgaaatgctacagccaatttgtcatgcctgtcctgtgttcctgaggacgttgcttttaagcttttctagtggcttgcttccctgtgactcccagtcatgtcaactggctgaatgtggatactacacctacctgagtgtcaggctggtctcactttacaaatacagtatctcatgcttatgctccctccacatagatttgacagcattatttggaaatatttcacttctctg

SEQ ID NO: 71077 - DNA, 642 bp, Homo sapiens
tcaggaaatctacttggaagtgtccctttccataaacagtattgttggctactgctcaacagtattgttgaacaaactgcatctgctcaaatagtaacccagttgagttaggtttaaacattgattggcaatggagctggcaaccaagaaatctctatctcaatgtccaagctacttcctttaaggcagtggaatgagtaacaatacggcaaaatgaaaccaacttattaaaggagtcatatcactctggcttcagctgtacgaacacaaccatattttgttttattttttaattacagaattcctacagttaactgtatatctatcatttcacactgaggctcagtgtttgattgcctcatataacacccatgtggagaatctttttctaaaaagattcttggccgagtgtggtgactcagacctgtaatgtcaacactttgggaggcatgggtaggtggatcacttgagcccaggaatttgagaccagccttggcaggaatggtgaaaccccatctctacaaaaaatacaaaaattagctgggcatggtgtcacatgcctgtggttccagctacgaaggagggtgaggtaggatcatagcttgagcccaggacactgcacttcaacctgggtgacaggac

SEQ ID NO: 71078 - DNA, 724 bp, Homo sapiens
gtggtgtgaggttttgcttagaggactctttgtgagatttttgtctaagggaccagcacttttagctaagcccttggaatatgctggtgtctgtgtcccttttggactcaggaaggtgtctctaaatggatggaaggacacctgactttggaaagagggacatcattctttcctgccagacattttcttgcatatgcccttttcagcctccagttacagaaatggacgaagacttagtgagaagggcaaaggtcaaaacagttgagtggagtggcctaggtacacagggcagcgcagaactccagccaccccgggccaaagtgaaagaaaggccactggtagtctcgcacccaagtcatcaggactctaagggttaaacttgatgttgactcatcatgattttgatttacacaaagccaaactgaaagctccttgtctactgcagttcctggaaagccttctatctgtcttcattcttcctgcagaccagggcagtggcctgattcaatccaagacgctcttcgaatcacactacacggagattacaaatacaagttttatgttgaagaaacagcattcctgactctttccacccccttccaaaaatttgaaaaatcgttgcatgatgttcagggtcgggaagaaaggaaagtaacaatatagtcttaaggccagcaggccggaactatcttggtgaaaagaaatcaggtctctcccctctcca

SEQ ID NO: 71079 - DNA, 2741 bp, Homo sapiens
atgcattggcttaattcggccaaaatacacctcattatgggtctcatcatccacctagacatgattcttttttgggagaaggtgatagaataatgtccccctcccatgattccatatcgtgatccccaacacctgtgaatatgttaacttacatagcaaaaatgacttttcagttatgattaaatcaaggattttgagatggggagattattatgaattatctggtggacctaatctaatcacaagggtatttataagggaaaaggggaagtaagagggtcagagtcagatacgacaagggaagcagaggtctgagtagttccgcaacaagccaaggaatgtgggtagcctctagaagctggaaaagtcaaagacacagattctcccctagaatatccagaaggaatacatctctgcccacaccttgatttaagctcagtgtcacttctgacctccagaactgtaataaaataaaactgttaaatcactaaatttgtggtcatttttgacagcagcaacaggaaacgcctaaggactcttgttttccttcctcccagcctcactgaccctcataggcgcccaagtatcaatgtgtattcttccgattcacctcccatccctttgaaaaatatgtagaaagtttgtcgtgtgctttaaaaaatgcacgtatggtatcctccctcatgtttggaatgttccttttaaaatcaacattatgtattgccagctttcaaatatgccctttgtccttttcacaaagcacagtactgccagtgtccccaactccacccagtgaagtagggctggtattactaaccctggagtcagcgctagcaaacaagggctcagaggtcaagggctggaagccaggtctccagactcccaggccaaggctcttttccgcagatgactctgtcctggtgtccagcagggcacagcccctagcacctccgaggccccgcaagtgtgctggcagcggcgacgccggctccgccacgcggagggaggaggcccaggcagcgcccggagtgggcggcgacgtggtggaagaagttttgttcggtcagagaccggacgcgggagctgcgggtgggccaggtgtccagccttgggagccgtaggagccgccagagccgccagagccgccggcgccccgccccgcctcctccggccgctctcgccggctcaggttacctgaggccggtgggcggggcggcccttcccgtctgcgccggcccccagcctccagggcggcggagccgggaagtggaagagggagcgaaggaggcggggactgccaaggctccagcccggccgggctccgaggcgagaggctgcatggagtggccggcgcggctctgcgggctgtgggcgctgctgctctgcgccggcggcgggggcgggggcgggggcgccgcgcctacgggtgagtgcgaccctcggggcccgaggggcggccggagggctgagggcggtgagggtcacggctgaaaggccccggaggtcaacgccgggcggagggccgaagctggggtgggtgctgggggctgccctcgcgaggccccgcgctcggcggctgcggcttcccgcgcgggatctctggggcccggtactggggccggttcgaggtgggacccgggagctgcggggttttcccgaactccgggtgcggcggaggtggcggcagcgaagtaagagggctgcgacttgtagtgggaagagcccaggaggctggcgtccaggcgtgcgggggcggggggcccgaaacatgcccacggcgtcagagggccgtgggtcagcgcccggaatgtcgcctgtgagcccgggaggaaatgaggcgccagagccggcggggaccacgaccgaagtccaggcgagctgagaacgcgccggggctctttgcccgaggccgcgccaatcctcactgtctaagggtggctcttgcgagtggaagttgaagggaacctctaaacatctcagtccttgttgaaaaaggacgtgacgctcatgacctcctctggcgtcgaagaaatcctttgggaaatccagaatagcatcccggcagatgctccccccaccccactctctttaataaaccttatattttagggtaattgtagatttatggaaaagttgcaaagatacttcagagagttgtgtatatccctcaccctgtttggtaacttctagttaatcaacctggcagttgtgaaaaattgggagttaatgacttccttaggagcagctcctggaaggaatggccttctggacgtttttggtgacaatgaaagccccaaactgtataggttttattatcacattgacacaaacacttatatatgcttattgcatttttaccaatgtgctttgaaatccaagttgaaatgttgattaggaaaccttaatgccctctatggattcagtcaataaaatacatgctgccaggcagtgtttaggggctgaggatgcagcagtgagcaaaacagatgaggtgcctgccctcagacatatcggggggtgggggtaaaatatatgatatgtctgagggtgttaagtagagaaaaacagagcaggtgggaaggggtttgccattgtaaaaagggtggatcgagaagaaaacaaatgttgctgaaaggtggcatttgagtagagacctgagggagacttgaagcttgtcagtcaataattattcaggtgtctgccttatttagtactgagtcaggccctctaggttgacttag

SEQ ID NO: 71080 - DNA, 936 bp, Homo sapiens
ttaggcagtgtctaatagttcctcagctggcaagtagaaggaggatctagcatcagattttagatatctttcatcactaagagatgggcaagtcccattaggcaaactaatcaaaaggccaggcatccaaataggaagatgctgaagctaactccctttctttttgagaaaggaattctggagttgagaaaggtgcagtccagccaagtgaacattggtctggggagatcagttcaggactcttgccttggtttttgataaattttcaaagggaatcagattccctgcagggtggagcataacatcatacagcagctaccagtgggaatgattcaccaaagccaaaagtcacatgggagccatcacacatacctcatcaagatctgatgggagggttgaacgtggtgactcatgcctgtaatcccagcactttgggaggccgaggcgggctgatcacctgaggtcaggagttcaagaccagccttgccaacatggtgaaaccctgtctctactaaaaatacaaaagttagccaggcgtggtggtgtgcacctgtaatcccaactacttgggaggctgaggcaggagaatcgcttgaacccaggaggcagtggttgcagtgagccgagatcatgccactgcactccagcctgggcaacagagcaagactgtttaaaaaaaaaatctgatggaaggaatttaggaatttagtttcttgtgtgatacagagaggtgtacttgacttggcagttgttgataatctgggttcctactttattagtgccagtttaatattgtttaccttgaactttgaaagaaattaaaaaaaaattatttgaaaaaattttccctctactgtcccttttctatgttattattcatatgcctgaagcataaggttcggatttagatactaaggcattttttaattttttatg

SEQ ID NO: 71081 - DNA, 1249 bp, Homo sapiens
gtaataattagctcacaatctcggggctacaaatacatgttttcaggagcatcagcaaaaccctcttaatcaaacaaacaaacataaactccaaaaccctgccttattcttctgtttttgcacaaggagctggaatccaggttcaagataattatctggccattctgtcttcttagaggtccttttccctttcgggggaagggaggaaagggtggaagcggcttccacccactccagttcgggcttgggtcagctccctgggcttcgcggagcacgccctggtgccaccggcggggccatttccgccgcgggggcccagacagcgccgccggctcgcgtagggtccagcggaccggcaggctcgccctcgcggtgccagctctgctctcttctggtcaccagggggcgccagaagcaatggtgcatcccgaaagggacggcggccacgtgacaggggggtcacgcgcagggtcgtaggggaccgcctggggatccccggacggctgcgaggaatgagcggttggctcgggctggtttcctccctccaccgcctgcttgtttcgccatgcccgggccggacggtggggctgcagcggcgaaagcgactgaagtccgggagcagtcgcatgagcttcccggtcaccaggaggccccgggaacagacacctcaccctgacattgtggcaggtttggcccttcccgcaatgcaacaaaggagggactttgtcccagcctttcccctagccaggagaggtgctgttaaatccctttgtgcctccccaccggccttggagagatgagatttcccctgtagtaccccaggggacgggccgacgggatggactttgtatcttttggctgatctggccggacatccttgcccaataagcacttacccagttgcccaccctccaaaaaaaggagaaaatcaaatcagtaatttgatcgatcattttcatagatatgctgtaatagaacaattcacctggttgtgaactgggctggggagtttcaagacgtgagtttgttaactgactagtttcttgcttggtgtagaggccttaggcactctcacacttaaaccagcagaaaggccagggagtatctagactacacactggggtcactcaactggaaacacgttgtacacctcaagacatcgtacaatttctcagactgagatgctggctgtgatgtctatgcagcacagccccaagtcccaactgacagaaatgtctcagaaacttaa

SEQ ID NO: 71082 - DNA, 1940 bp, Homo sapiens
tccgcctcccgaagtgctgggattataggcgtgagccactgtgcctgacacaaaatagttttcttgtgctcagcttccccttctctgtgaatagtccagttttttcctaagaacattacctcccaactacagactagaaacttggctgcctcggtttggacccttgcttctgagcaagtagaatcttgctgaagaagggaatggcatgtggggcagtgacaaagggcaggaactacctgctttctgaatttcctactaaatttcctacttaaagccctgcatttcacactatccccctcatagctgtgggttatgcatcaggagttctgatttggtgcctcttgtttacttctctgccacctctgcctccagacccagggtcagggagcctccttttggctctggctgggcagccaccttggttagtccagaaggactcgtggctcccagagggtcatcatagcttggtactgttccatcgtatgtcagctactccaccttccacctgatcacaaccagtcttttcccaaacttggatcttttgaggaaagatgagacaagaaaatgtagcagactccatgtgaacccttctctagacctaggaaaacttattcaatactcctccttactaagagctaatcagtatatgaaataaagacactcaggaagtttgcctgaaggttaactcagagacctgggagtgaaacctagctctcctgcttcctaggcccctctgtgccatctatttttagccaagctgccctgagccttgtccatcttgtctgaaagccaaagtaggcacacagtttgctcataaacattcctgtgcttgccagctcatgctagccaaccatttagatgttggttttaaaactgcgagccttcccttgtacctacctcctaaggcctgcaaagaatacacaccaagggatcaatagcctgagtttttcccgaagccaagtgacctcagtcaaatgccctcaattgagaggcgtgtctattactcgttcatcttggcacagggtgcagcaaatgactccctctcagagccactgttcctggtcacagttctttgagtgtgctgacctactttctccccttcacaggaaaaacagaaaccaataaatgtctccagtgagtaatcttgctttcaggagcactgactctgtgttttggcctcttgtcctttccctgctccattatcactctgctataaccataagaaaatggttcatgactgaactagaactctgtttgttgtttactgtccccattctgtagctgggttttcagagcaactatggcccacatatcacagggatgggggcagagccctccctacctttcctttccctactacaattcattgctaaatagcataatgtggactaaagttgcttctgcacaagaatgttgggaatcaacagagtatctctggttttggccacacatgctatgcgactggtagcattatggactgagaggcattcagcttgagactcctgacttaacttactatatacctttggagtgggcctctaagaagagtcaggtggctcaattcggttgccttgacaagcagaacctctttactgagcgtgtacaggtgactctcaaatacccacactgagattctctgtggctaatggattattttaggctgtccttacccttcacagtcttcatgctattgcccactccctccagccatcatctggaagcaacttggaaatatatgctcattttaatgtcagtctgagaaaagttaactagaggaataaatctactggggttcagaggcaaggtgttgataggacatataatgtattccagagtgccttttggattatctaccggtttttaataacctggcatgtctgttcttcatgaccatggataactgagtatatcttattttgctcccctatccctgggcactg

SEQ ID NO: 71083 - DNA, 3804 bp, Homo sapiens
ccggcctggtgtgtctccagctgggcgcctaccgcctgccccagcgctagttctggcgttgggggtagagaggtaaagaggggagttagcggggcatctccctcccagggctgagccggcaagcgcatcttctccgcgagttcctcactgtccagcgagcgctgcccaacttctgcgccggtgggacccgctgctctgagtcactcttggcacagaacaccaagcaccctcagaaaccgaattcaccacctttgggaggctcctgggagaaggcaaggaacccaggcggggctcccagggctctcgggctgggactgggttgtgtgtgtgtgggggggcttcacggatacccctcccaacctgcttcctttccctgacagcagccatctcccccaagagggagagtcttaggcgtcccggaagaccctgcggactgtgcacctcgaggtaccagcctctcctgggaggagtggggggccgctggtcagcggctggcagaggggacctgtttgctggcccgtttggaggtgggatggagtggggtttggagactgagaagcccaagagaagacactgagtttctccccaccccacaaccccacttccgaaaaagaaccaggtggtgaggaggaataaggcgaagtgtaaacacaaacaacctcaaaaagaagccaagaaaagcgaagcccaaagaagcaagagcaacactgttacaaaactgtctggttttgtaacaatttccccgccgccggccaatgaacagcgtggcggcacgtcacgtggtaccgttttatataacactttgctgagacaagacagttattaggcggcgcggggcggccggcatggagctcccggaggcgcggcagggtcaggagctcggtggcatggcggcggtggctgccccgatttcctccagctgccactccttgcttcgtgtccccggtccctagacgcctcgtctcctcccgtgtccctcttcccatggagtcagtacggatcgaacagatgctgagcttgcccgctgaggtcagcagcgacaacttggagtcggcggagcgaggggcatcagcggcccaagtagacatgggcccccacccaaaggtggctgcagagggccccgcacctctaccgacgcgggagccagagcaagagcagtctccggggacctcaacgccggagagcaaagtcctgctcacgcaggcagacgccttggcgtcccgggggcgaatccgtgaagccctcgaggtgtatagacagctctccgagcggcagcagctggtggctgagcagctggagcagctggtgcgctgcctggcggagaaagtcccgcaaggcgaggcgctggcgccggcgcccccggacgagggtagcactgcaagcggcaccgtggcggcggaagagacgggggccgccgcggctgcggcggccaccgaggtgtgggacggctttaagtgccggaaatgtcatgggtttctatcagaccccgtgtccttgtcgtgtggccacaccttttgtaaactgtgcctggaacgtgggcgggccgccgaccggcgctgtgcgctgtgcggggtcaagctctccgccttgatggtggccactgggcgggcgcgtggagcccggcgggctgggcagcagccgccgccgccgctgcgagtcaacgtggtgctcagcggcctcctcggcaagttgtttccaggcccagcgcgagcgtcgcaactccggcacgagggcaaccgactgtaccgcgagcgccaggtggaggcggcactgctcaagtacaacgaggcagttaagttgggtgagtccaacgcgctgccgggccggggctggggctcggtggctacatgagggagcgggagaacaaaccccgcagcgagaagggatttggaccagggcagaagagggggcgggggacccatggactgtggcggggtgggggaggggtgattctggggctgggtctctgagtttgttctgttttcactgcttatctgtgtttcactgtgtttgtgttgatctcggttgctttttgtcttttcctgctacttctgttagcttttgtgttcctgtctctcagtccccgttcctgtctgtgtctccttgcttctggttctttttctccgtctcttcgtatctttgtcactgtttctttctttttcggtgtcactgtctctgttcctctgactctccttctcccgctgcactcctggtctcctcttacacctgctcgcaccttcccagcgaggagaggaacttcgcgcgctcctcgcacttgcgcccggtcctctgggctgtagccagcaggagatgtccggtcggcgcctgcgtccgccgctcgcgccgccgggtgttgccccttccggggccgcggctccctgtggggtgggtccggcatggaattaggtcaggagagcactggttgcataagggccgcgagcggcccgggtcgggcgcccctcccccgcgcgagcgggcgggattgtgtaaccgctgaggtaactgaagtgggccaccacgctcgcttcggaaaccatcccacgagcatgtgcggggggagggggagcgcttgcgccccgctgccctgtgactcattgtcaccgcttcctatcacacgatcctcggctgaaatagatgcccccccttgcccgccccgccaacccgtagcctgtgccctcgcctccaacccctttaacctggccagcccggcgggaggccggcgcggcaactgcttggggatccctggggaccgtgggctggctacgaatgggtcacgcctctgtcccgcttttcagtgccgcctgggagggttgggtgggctttgcagcttcaagggtaacgtgggcagtcccccatctccagctagactagggcacccgaatttccccagggagccgctctctgacccaccacgcctggacccaggaagtggctgctgagccgccagccggtgttgcccagctctggcagtttgccaggagctcggccgtggggcgcggtgtctggcgaagcatgccggggaggaggcagcagggctgggcaggcagggccctgggatccgagggtgtcctggacctgactctgtggagtggaggaggggtgtgggccggagtctccacgtgtttaatctccactcaagcttgcaacaggtaatggggggaggaggaggaggaatgaggactgaaggggcaaggctggcagccggagaaggggacccttctagctcctgtctgtgcacaagcaaggcagactgtgagctgccaccaggctggagtgtgctgcagaagaaaaaagacagaaaagactaaacaatttgctaatgtcttaagagcaagtaatgggcacgcaagcaagccctgagcacacccctggggaaaaaaaaaacatcaaagcctgttgccacagaggaagctagatcccagatcttggggaagagcagggcaatatgaatgaggcaggtggaggtcacttaactctagatctctaaggcagattccataccttttagccatcccccaggggccaggaaagccccttcctgccctcacccttctcctctgttgccaccacattcccctggaagttcttccttgcatctttgttaatcccctcagagaagtcagggtgaaaatgtcaaggccagctttacccttctaagaggaaaggaggctctctgttctggaagatggccattgtgtccgtattattccaagtactgcacacaccttcagaaaaaggaacctgctccccacatcccagcttcaaagcttcaaagtctgaccagttatcagtgactgcccagct

SEQ ID NO: 71084 - DNA, 1570 bp, Homo sapiens
ttgatttagaaaaaaattgtttccagcctgggtcacacattgaaggagagagagatggattctcttttctcagcatcctgtgggaggaaagcctgtcgcctgatccacatcagtcctatcataggggtcagggtccccattctcaccaatcatgcaaatgccaaaagaccagtctgggatgctgcccaacttcttgaccctgaaaattgctttcttgtcaacatcattgctgtctcagaacgcacctctgacctccccaatccccaaacagcacacccaggtggcttattcgttacctttgatcacatttgtctgagagaaggtaggagtgcaggactgaagaatgtgtaactctgggggagtagtggtgagagaggtcagttggggataacaaccagagctacagcactcatgcgttggctctaatactgaagtccagggtcatttccagcttgctgagtgaccttcagtcctctatgagtcacagctgcagctgagtcataggcagtgggagacaagctatgttttccgcttctaggccttcttcctcatcccctcccatactcttcccagctgattgaggaaggagctgtgtcttctattattattatgacatttgatggcttcggagtcatacagatttgtcatttaccacctgtagattacatcctctgtctgaggtttaatttcctcatctacaatgaggagataaaatggtgctttataatatgtcacaggattatcgtgaagtttaaagaagataaatcatgtaaaaaatgtctcaaagtccctgtcacacagtaagtgctcgaagagtgtgaatcattattaaattactcccccaaatcattttggaagttaaattagttgatgaaatctaatcttggagtcactgctatatagaggtaaatagaaggttatctccactgtaaatcactaaattggccatgtgtgtttaaaatccatttattatgagtttgattagtgataattatctccccagaacctcatcaccctggaagaggaggcagtgatctaatctaatttctgcatcctaaaagctgaggatcaaccctcagcacatgttgacccaatcgaaggccacatatcccaaaaagctaggcatgaaacaacacatgggcttctctctgagcttccctaatgcttggtaaggagtgtataaatgcattaactaccttctaccatgaatgtagtgactatcttctattaactaccttgttagacttctgttagggtctatcccagggttctctgtgttcatactaacggaatgatttgtgcagcccatatagaagatgatgtcattgttcatcactgtcagtataacttgacctttgaccacttgggtgctccctgggttcttctgcacacttgaccttttaggcatcccttggatgccctaacatcatactcagctctcaatggaactgaccagctctcaaattgaaggctattttgcgaggttcgttctctggaaacagcacattaatcaatatattctttttttagacagagtctcgctctatcgccaagggtggagtgcagtggc

SEQ ID NO: 71085 - DNA, 548 bp, Homo sapiens
tgcagaagctctcagcctcactttcctgaatcctgttcttggagtaggagaagctgactagcatgatgtgaggggcccactatcctggccagatccccaagattaccagcaatcactgcagtgccacaaaagcatccaggtcctgttgaaatacacattatcaggagttaatcattaatgtctactaacctatcatcacaggtcagttggctaagagctagccctgggccacaagatggcaatgtgttagccaagaggaagtccacggcctagaaggccagaggcctggagaagacaggcttggagagaagggcaaagttcaggcccagaacgcctggggtggaaggggtactgaaatcggaaatgggttgtaacaggagagactggggttgctaaaaacaaagttgccctgggctaggcacggtggttcatgcccgtaatcccaggccaaggtgagaggatcacttgagcccaggagtttgagaccagtctgggcaacatagcaagaccctgtctctataaaaagatttttttaaaattagccaggc

SEQ ID NO: 71086 - DNA, 918 bp, Homo sapiens
gtgctcctggtgactgaacagtctccatgtttggtgaattcccactctcgggcagcaaacccccctccaatccccctggactgcctgaccgcccctgtctcaagctgagtgggaggagagagccgcaccagagtctccgcctctgctgctggggctcctgctctcctggctcaaggatatagccatcttgttgtcagccatgagcctcgagggccaccatcctccccaaagtgctctgggcagctccacgtaggccatttctttaaaaagttcaacattcttcctaaatcatacaactactatatgatccagcaattacacttcttggacatctctcccagaaaaatgaaaacttatgttcacatacaagcctgcacactaatgttcatagcagctttattcataatagctcagaatgagacaagagaaaaaggtctggaggcaggcaacctaaggccgtttcaccctgaattcctataacaaaattgaaaggaaagccctaactttccatacctaagtaaaaaaggaccagaggctactccttttgcaaacccccaccggcagatgggaaattgaaagtacctctgattgtttgctttttgcggccaagtctttgtttgcatagaagtgcaactttgtaacttctctttagcctctgattggttgctttccacaaccaatgagatgtttgcataagagtgtgaccttcgtaacttcacttcagcctctgattggttggggaaagctttctgcaaccaatcagactgattgtgggccaccacttcatttacatgaggtaaacaccaagtggccaatgagaaacctctagagggtatttggccctgagaagattctatatctggggcccttgaaccgctgctccacagctcccacactggagtgtactttctttctttc

SEQ ID NO: 71087 - DNA, 1425 bp, Homo sapiens
gccggactctagaggctttggagggggcctgagggctgcggggcgggaccgagcagggcggggcgcttaggtggcctcgggggaggcggggcttggaggctccgcccctcaggccccgcctcctccccggctagtctttggccgccgccgaaccccgcgcgccactcgctcgctcagagggaggagaaagtggcgagttccggatccctgcctagcgcggcccaacctttactccagagatcatggctgccgaggatgtggtggcgactggcgccgacccaagcgatctggagagcggcgggctgctgcatgagattttcacgtcgccgctcaacctgctgctgcttggcctctgcatcttcctgctctacaagatcgtgcgcggggaccagccggcggccagcggcgacagcgacgacgacgagccgccccctctgccccgcctcaagcggcgcgacttcacccccgccgagctgcggcgcttcgacggcgtccaggacccgcgcatactcatggccatcaacggcaaggtgttcgatgtgaccaaaggccgcaaattctacgggcccggtacgcggccggcgaggggggcttggagacaaaagaagggggccccggcacggggctgggcgggagagaggcgaggcgggagcggggcgcccctgagtggagggaggaatggcggcgagctagggtaggcgggtaggcgggcaggcggagagccgggaggctcccggggcgggcagggaacaagaggcgctctagaggggctgcgggccagtcagggacgcggatccccggcccgcgctgacagcgctgggagggggttagagaaagaaggctgaggcgcttaagccgggggtgggtgggaccacgaagctcgaaggcgttgaggggggacacatcaaagcccaggctgttggggtagttttcgaaggtcctgggcttggggattcctggaaggaggagggggtagtgtcgggttctaggaaggaaatgagggtgttccgagggaggcatgggggagggcgagagtgagaaaaggtccagacctagagaagacgggaaggccaatgacaccgggagtaggtttgaaatatgagggtgtgggagaaaacgccgagacgggattagcagcaggtaaaagctttgtgcccggtggatagtgatgtgtgtgtgcactcgtggtgtgtgcatgcgcggtgtgtgcgtgtttagtgtatgtgatttatcaggggtgtgtgtgtgtggtgtgtgcatgcgcgcttgaaatgggtcatgcgtcaggtatgtgtgtggcatgtgtttggtctgtgtgcgcttgtgctgtgtgtggcagatggggaaaggctggaaggtgaacaaggaggaagggggctgtttgagggaggaataaaggctgaatatggtggacaatggtaacgt

SEQ ID NO: 71088 - DNA, 1590 bp, Homo sapiens
tacctaatcagaactaacacatataaactgcttacccataccagtcattgttcattaatccttacaacaacccctaggaggaaaaaattataatctctgttttataaagcaactgacacacagagaggttgagtgacttccccaaggtcccacagctggtaagctgcagagccaagaatcttacacaggttcaagagtccagattcaagtccccacacccacacagcctctgtcaatgaggacatacgtacttagggccgttttgaggattacatgagaacgtctgtaaagcccagtacttgacaagtgcctgagagatagcaactgtggttgttagaattttttaccttctgcactgggaaaccatcaaggctttttggttaggcaggaaaaaaaaatgggttggaggcaagaggaggaggagggaagcgccaggggaggaagacagagaagtggcacgtgaaagggagaaaaggggcaaaccagaggagaggcagggaggggcggcgggggcgcactgaacatttaggaagcaagatgtctagcaggctgggccttgagagaacagtaactgtttcgcaactgaaagtcgctactcgagccttgccaactggggagactatgcccatgatatccgcggcctcggaccccggaccctccaggccctcgcgccccacccccgaccagcctcgggccaggctagggcgtagacggggcttcccgtccctcacgcgggcccgccccatgccgggcggggcctggggcccgccacctccgcccgtggccggagagccccaggcccgagccacgcggtcttccgggcccgggtcggggctcgatggctacgtggaggcgggacggccgactgacaggcggccaaaggctgctgtgcgctgggctggcggggacgctcagcctcagcctcaccgcgcccctggagctcgccaccgtgctggcccaggttggcgtcgtgcgaggccacgcccggggaccgtgggccacagggcaccgggtgtggcgggcagaggggctccgggccctgtggaaggggaacgcggtggcgtgcctgcgcctcttcccctgcagcgccgtgcagctcgccgcctaccgcaagtaagagccgggcggggccggggaaccgggagaccggacgggggtggggtgggggagccgcggcccgacgccgccctgctgcctggactcggggccctggagtagggacggcccccttgtcgatcacctggggacccctcggggcggtgggccacctctatggcccccagagtgcagccccaatgcttttcacgttctcttggggttaccgccctgcaagatgcagttttgtggtccgcagccctggtccgagaggctttccggattggaccgggcgaggaggtggaatgcagcaaaggatttggaggaaaggaatgaaaagctctccagagagatgagtcctaaccatttccaccgtcctccaatttggaaacttttgcttaggctggcttaggaagagagagacccttttaaaggtgtttttgtctgtgtgacccaagccccgagaagaaagtgcttggtgtggggaaaggaccc

SEQ ID NO: 71089 - DNA, 447 bp, Homo sapiens
ttaaaaaaattccacttccataggctaggctgtctccatggcctcttctgggcaaaccctgatttatacaagcaatatattcctgaagaactctatagaaattaatttggggtcagctgaatccaagtttaaatgagcagtcccagccaagtttggttttcccctgtgactctaacttgtcctcgcttgctcaatgtccctccccgctcccgctttccctctgtagtagtcccggctgccctgggccatcgcttacctcagcactaaacagcctgaaggtgcttatcaaagctgccactccactccctgaaacttcatctgtctgggttgcattcctttcctgtccttgtccaaacagataattgtcgcatcattgtaatggtagtataggtgcaaaatttttctattcgttggtaagaagtctttatatattaaagatattaaccc

SEQ ID NO: 71090 - DNA, 1079 bp, Homo sapiens
gccagaagagatggcagaacttagtgtattgagagaacaagtaggaagggtaaaatattgacagagatgaattcatctgattaatctgtgcaccccgaataagaaccagggagtcctgagaaaatggctctctgcacaggtgcatgtgaagaagagagggagataggctggggaatactgccctgaaaatccagggagcagctgagaatgtaggagccttggaatctggcaggccttctgaaaggatcaggagggaggtaccagacacatgctcggtccccccacaactctgcctgacaccctcccctattgcccatattaggtgtctccatttcatcaaatataaaaccaagtgtgagcctgttgctttataccccagtggactttgaccccatcacagctcacaaggtaagcaggattgggccaggtcagcatttgaactgaaagcacataagatgaaggacaaaggtggtatccgagtggtacagctgactgagcagaatatacatggtcagtgaataaacagaggccccagcctactcaaatagagatgctcgacacctcgggttacctttgttgaattggacacagtcacttcattcattccctctcagggtgctcatcccctcttgtagtttttcatgttcatatctacatcttcaatcctgacctcccttctgagccatggtcccacatttcccacagcctgctcgacatcactatttggctatcatatccccactgtcacctctaacttaatgtgcatcaagctgacctcttcttttcctaacactgttattccagagttttccatttcaattccatcattgccccagtgactcaggctggaaatccacaacttgtgtttgactcttccccttcccctcacccggttaaccttgagccctgttgcttcttcattcctaacattcccatgctggtctttctttttgtcactgcctcttgccctaatcttggaccttatcagctcatacctaggctattacagtaatctcctcattggtctccaggattaattctaaaaatgatcttaagcattgaatattaatatgtactag

SEQ ID NO: 71091 - DNA, 1099 bp, Homo sapiens
tctcacccccaggcaaggtgacactttcaaagttggcacggcaggcagcacatgccaggcctgtgacccaggcctcagcagctctgctcacttgcatggcaattgctttctacagtcaggcccagctgcactttgggtctccccaacccccacccccaatcaccacacaggaactggctgtttctcttttcttcgtccaagctgaatactaacctactgtggtttgcttgcttcccccattgtgatcgcaggctttctgagcagctagtcaaccctctagcctgccactgaatcggaaggcattcacactggaggggatcaaggggagcttgtaggcttgccttgctggcgggcagctgcctacacccactcgtaccaatgtccccgctgcagagcccgggtgcttcccagctgtacaaggacaactatttgggtcccggctatgccaagagaaacatgggtcatgtggttcacaggacagaaaggttcatttactccaatatgactggcatttttttttgtttgattattggatatttgccaaaagactgaagcctcctgccacaaccacctcccccacatatatgtcctcagatggtttgggaattggacagcttagtcatcaggtcctgtcctccacatccacagaagatacaagttgtttccagataacatgcagaaggttctgagctccttcctgtgtgctccagctcgaagactcttttcttttccctatgaattttttttccttttctttctctggtctttcctttttaatgcccttttaaaattaagtattctatcttttgagtgggtaacacatacacatgatacaaaatccaaaaggtgcaacgagtatatgctgaaaagtaaacctctctaacctttgtccttagccattcagctctcctgtgagtcagtactgttgttagcagtttacctgtatctttccaaagatggtctatgcaaagatccacataaacttgtacatttatgttctgtttttaggtcagcagcagcacactacatacactcttctgtgccctgttttttttccacctgaaaatgtatctcggctgggcacggtggctcacgcctg

SEQ ID NO: 71092 - DNA, 2361 bp, Homo sapiens
tgttctgaacttgagggagtccacttaagctaacaagtaggtttttgaggacatgtgtggcaaatgcttacccagtgaagggattaaggggctcagtaagcacttgtccattggcacaatggctgccaatctaattctattgattcctctaaatgtttctggagttcagaaatctattcaatccaagggcactttacctggggtcctgggagccaaatgttaacgtagttcttaaccttcctaagcctcttaaccttctgggtacaacctctatatttgtcttctggctaaaatcatttccccacccccagcccagtcctttggactctcccaggccaattcctggcaagatctttgtcgaactgtatttgcaaaccagggtctggggcacggtggcagttccttcgtctgctgttcccttaatttcgtctggtttcactggctccaggacagcacacggtctagagtgggaagagtgaggcattcaccttggtgaaaaacaactcagtaattaagacaaatgatttttcatgtactattttaaaaaaatcagaagcaatgcaaaaatccatgatgaacaaatgatcaacatttgaaatacagacaggatcccaacctgcacttgcatgaccttgtctcgcttgcctcaccctaaacccagccttgacactccaattaaactttatttacaaaacaagggggccggccagtaggatgtagtttgcccatacgacttttttaaagtatcgcattgactactgtttatctcgatgactgaagggttcttttggcatccctgtagcaaatgcgtctcaccctagtcctggtcctgctccaagggtttttgtccaggcacatcgtgacctcacccttcctcccctctccgaggcctctctcagggtccagcgttcaagtcccgggtgttctctggacccgccccttcctctcgccgggtcaggtgccgagggcgagcacgggcggcgcggagagcagtcccggcccgccctccacgactcctcctcctgcgagctgggccactcagcggctctgccgcccagcgcgccggggcccagaccccgccccggccccgcctccgacgcctgccgctccagctccggctccccctatataaatcggccatttgcttcgctccgccccgcagcgccggagtcaaagccggttcccggcccagtcccgtcctgcagcagtctgcctcctctttcaacatgacagatgccgctgtgtccttcgccaaggacttcctggcaggtggagtggccgcagccatctccaagacggcggtagcgcccatcgagcgggtcaagctgctgctgcaggtacgtcctgggatccaggagcccaaccaggaagtggggggaagggtcgcacagaaggcgggcgcccgaggggtggcggggagcgaactctaaagacatggccagggaagcggcttaggagaggccagagcggggcgcagaggcagaacagaagtcaaactggtgggaggcgcctttagtgacctgaagtagtgagtctaggaaggggccgggggcagagggcaggaccaggctctcggcatctccgaggcggcggactcggatggagcagtttctgagtgacggcctccccgggcctgggcgtcaagggcgaaggccgaaagccggcgttagaaagaggaacgccagttcttaccgaagacctcaaggtcgcggcaaggagataactgcccgggggaggccatgcgcccgggtccagcggcctcccagcccgcggacgcgctcaaacctcgccgggccggaagccggcgccgggaagcgcgtgtgccttttacgtccgcccccgcgcagccgcggccgctgccgccgcgtctccgcctgcctccctgcgccgcgcgctctccagtgccggctctagagggcgctcctgggctagcgtgtagggctggcggcggcggcgctcgggtcacctctgggagcggagtgggggcggagcgagacggaagcagctcaggagacttgaggcgtaggctgcggtccccaaggtgaccgcgccctatgtgggactcgccctaatgcctctgaacctgggtttgaggtaatgacctttctcctaggtctgaaggtcacgggtccgctggaggatgccccctctccactcagaggggtggaggcttaatgctactggtgcagatcacctcttcccctgtgacagcctcagagggttgggagggtccagccagtatgatatacgaagactagatttgagagaggggagcctaccttaaagggcattgatcgagatggcataagctcttctctttcccttccccatggttataactgtccctgttggcttccttcc

SEQ ID NO: 71093 - DNA, 1483 bp, Homo sapiens
ccttagtctcccgagtagctgggacaagaggtgcaagccaccacacctggctaatttttgtatttttagtagagatggggtttcaccatgttggccaggttggtctcgaactcctggcctcaagtgatccaaccgcctcagcctcccaaagtgctgggattacaggcaggagccactgcatctggcccgactgttattgttttattgaaatgctttaaattattttcacttcattcatgggagaatggtttaatggatttatccttttcctgcagattttctaaaacagtctcaagaaaatgctatatatactatagaaagtggatcacacacacacacacagagagagagagagaaggttgtaaagaaagaaaaggacatttttggaatggactgaatgaatagaaacatgtgcttatggtgataatcctgagctctaactcagagcacttattttacaacactgattatgaaagagaccaaaggtcaaagataaatccgtcctgcctcacaaccagactgcactgctcacctgacccaggggccactgtgtggtcaccaggattcttctcacagcttcctttgctctcgtagtatttcaaggaacccatgaggtcccagcctgattacccaaccctatgacttcactccctagggaaagaagctgcagggaggagaaaatttactgagacctttagaagcaaaggatctcctttcactttcacaactaagtccagggttcaggagtccatttattacaaaaattgagcttcataatggctttatcccagaagtgaagatcagggggtaaggacgcttgggcttctgggtaaaagcgtgctgtttgccaattagggtagaaagctaggagtttgaccactgaaattgtaatcccacttcggctccatgtttctttgtcttgggtcatatcacatcccgtcactagttagtggctcagtttgtctaccaggaaacctggaaatcaactttcctttttaagctacaatataattcctcaaatctactgtgggctgtggttctttttggagtttctagggctagatagattgaattaagttaagcctgcgtcttcaggttaaacaatcgatacaaccaggtaacagtaatttctctaaaactacagaatcaagatcatagctcattattttgacatcttatatgccagatgttgtgctaagcactttacatggattaactgtccctattgtctcaacagccctaagaggcaggtattattattcactccatttcacagctatgaaaccgaagcttagagagatgagataatgtcctctgagctatctgactcggcaaaaggtttcaaagagaacttcaaggtgaccctgtccaactatttattttgggtcatgaactatattaaaatatgaaagccggctagtttcaataccaactgacaaaatccatttgacaaatattaaatagaaattataataacctcagt

SEQ ID NO: 71094 - DNA, 2239 bp, Homo sapiens
ggtgtggtggcgggcactgtagtcccagctactcgggaggctgaggcaggagaatggcttgaacccgggaggtgtaggttgcagtgagccgagatcgagccattgcactccagcctgggtgacagagagagaccctgtctcaaaaataaataaataaatatctgtataacgaaataaatagagaatgaatgaatggcatgttgtagggtttgtgcattggttattgattggcatgaatgaattttggctcgatccagccacttgatacctgggaacaattctgtagcaataaatgtacagggcctttctttttcattttcttacataataattcagcaaatgtccggggccttttgacttgcagctattgtttttccagaccctgggcttacagggaagatctggatattgcaggggttgggaaatcaactggttcctgtactgctgctatgttgtccatgctagagaaccagagaggcgggaccttggcacacacccctcccctcctgaaatctgtgtgaaaaacagctgactccacatccagggcttctaccatactgtgttcatgggatgctggcctgtgccacacatgtgctggccatcttgtcatgagcccctaacacagagccctccacatagtaattgcctgatggatgtctggttgtgatgatgacaatattgaacagtggctgtcacacaacatgactcaggccactccaaggggagaggaacagacatgttcctggggcacctgaggacgctgccgatagagctgtgccaactgcacgcccatgtgactgattagggctgattaggccagacctgctcccagacctgggcctaatgttcccagcttctaagactatttcagccactaaaagcccatgagaacccttgagtgaatgtggccctttttgacgtgctcaggaagcaggcagagtttgttctctctcacttgtgagtgggaggcctccaggagtgcagcagcggacttgctcagtagtaacatccattgtcatttcttgagctttgactatgggccaggcactcttttaattgtggatactcatttaatcctttcagtggccttatgatgcaggtgctaagattaccatttcccagatgaggaaaccgaggcacctggcaaaccacgtgtaacacctgcagatgaaaaccctgaaaacaaagggaacccccccccaacttagagagagtcagaaagtagcacttaatgctgcggtgcctggaaaataaccacggaggcccagaggaagggaggggttcaagctctttagggaccatcggcctgcttggggacctacccatgtgaggagcccctggagaggcgcttggtgcagtggttaagagcatggttccgcccctttccagctgtgaaatggtgagcaagattctaagtctcactgcctcaccttgctcagccggaaaatggggtcaagaacactacttgcctggcactgtagtgaggatgaaataaattaatatttgcgaggcgcttggcacaaagcctagcatataatatgcgcttaagtgtttgttaaataactacgggctctctcagagtcggccccttccctttaggcgccggttttgtaatctgggaaactttgtaaagagcgctctcagcgcggtggctaaaacagtccgctaggactatgccgagtagcagcagaaggaaatggcccggcccgccaggcggggagctgcagacaactaggagagaggagggcagggcacgccctgagggaaaaaacgcggcttttgcaggcctaatggcggttgaaagtcgccgaagtgcaaggctggattgagacagacaggctgaaaaagtcgcagcgcagccgcagcggcagcagccgatggccgactccttccttttccagtccacgtgcccaggcgggtctccggccgcctctcgcacctgcctgcagagggcgcgctgcttctcgcctcggcctgggcaccgcggccgactccgctggaagagctgtgtcctccacgcagaccgctttccaccaagctcagctaaacccaccgcccccaagaagtctaccctggccgctccagccaagctcttcctcccctgaacccccaaagcatcatcagcactgcataatttagaacttggatatgtgctggctggtcactgtgtcctacgtatgggacaaatcttggctcaacaatatcatactttgcatttctcccccgagtcacacacggc

SEQ ID NO: 71095 - DNA, 1891 bp, Homo sapiens
tagtcacacctctttgcagactttatggcaggccttcccttttttccaaacccctgtgaatagtgtcagacagcatctgcgggaggatgtgtgtgaatgctgggatgcagggggcatggcagggagtggagcacttgtaattctgttgatgttggagccctcccctttcagagtgcattgagtccttagtgtgtgccccctcgccccgatcaattcccaatccctgtgttgcagagagggcagcaccaccttctcagccgcacaggatattctcaggctgatgccaagagcaaatcactcccagccagcacacttctgccagccttggtaggcacagcgtgtagcagtgcgcatgtgggtggggacagaggtgacttttctcatagactgggagaaaaaaaaaggcatctgaacttcctggttacagaacatccggctagtagaaacctttgtgtgtttgtacgtgtcgggcagggggggattagtgaggttcccctcccctctagtgttagcaataatgaaggacactctttgtacaagacgtcaagatgagagcttccacacaggactccacactgtgcttctgtttcaccaggaagaaatcttgaatgtcagccaggcttgtactcatcaattcattcagccagtctctgagggctggtccttctactgagtgctggctagggtggggctgaggactgtgcccctggagagctgccagcctaggtgcaaacacagaaccttcattcatgcagtgacatcacagcagcccatcacaacactgccccaactgcatcagagcagttgcacctgataggtttcccaggggttacctgaggagcaaagccaagtgcgtgtggcccaaagtagacagcatatagggcctgcacgctgaggactgccccaaatgctggcccagctttttccaccagggagggtcagattccaaagccgacagccactcagcacgaggcccagacccaaattccactgccagccacttctactgctgaaaaggaaatagggccgaaaatgtagacttcaagggcaaacactggatcacccttgggagtagcttccagagctctgagtaacatcctggaggcagaagagaaatgtttgccctgccccccagcccacagtctccagcatcaccagcctttctggaaagccttccgaagtcaatttcagcccagccaggagcagggccaagttgacagagggctgagccagagctcccctgcactcacaccttgatctttctcttcctcttagacttgagtgcttgccaggtgtgcattccagagtcaatgcaagtgtccctggctctcttccaccccttcccaggcaaaaagaggccacccacccatggaaaagccactgttgtcaatctgtcgccagaactctcgctcaaggtggcagtgaggctttggtgccagctagggtttgctttggaatccaggagctcccatcaaaggcggtgggctatggggtcctgaatgaatggcaaaggggcatgggagtagggatgagggtcattcaggacttggaaatatagttggccccgggtatgtgctggagctggctccctctggcccatgagagccagatgctatattttcagaagttttgtgagtcagtcattaagcatagcacttattttaaaatatataaaattacaattaaataaattatattaaaaactaaggtaatcaatgtcccaaaactcatcatctcctaatcattttactttttttttttttttttgagatggagtttcgctcttgttgccaggctgaagtgcaatggcacgatctcagctcaccgcaacctctgcctcccgggttcaagcgattctcctgccttagctttccaagtagctgggattaca

SEQ ID NO: 71096 - DNA, 814 bp, Homo sapiens
ctactcgggaggctgaggcaggagaattacttgaacccaggaggcggaggttgcagtgagccgagatcgtgccactgcactccagcctgggcaacaagagcaaaactctgtctcaaaaaaaaaaaaaaaaaaaagaactacatttgttcatcaagtgcaaccacagatataagagttgggcaacaatcgatgaaagcattctgtgagaatcacttggctatattgaatttacaataaataatattgtatattttattgttatggctaattcgtgtactatatatcctttacataagtaaaatttataattaattagcttatgtacataaacacacaaaaacatacacataccttaccccaccccgagagctggtcgttaaacatttacaaactcaccactggttaagcccaaggttcacaactactttggcaccagaaacacaaggttcaaaggtcccagaggtactccaaccctgaccagaacatgatggaggacagacaacgtggctagaaaacatctatgtgttaaaaaagcaaagcaaacaaaaactttttttttgctctcactaggccataaactccatgaaggtaggaacttcatctctgccattcatagtggtatctttggcacctagtcagctcaatcatttttttttttttttggtgtgttttgctttgttttgtttgagatggagtctccctctgttgcccaggctggagtacagtggcctcatctcagctcaccacaacctctgcctcccggggttgaagcgattctcctgcctcagcctcccgagtagctggggttacaggc

SEQ ID NO: 71097 - DNA, 1627 bp, Homo sapiens
accaaggggaaatgtggttccagagccaaattgtgagtgcccaaaacaaaacagaacaaaacaaaaccctactccgcctgccttaagctcccattccctcccacaggacatacaacactatttcattctgccctggggtgatcattggcctaaacgttgagcgcccaatcctgcattcaatcccacagccccgccccgcccccccgtcatagtcaaggccgatttattcttttgattttccgtgattttaaccaatcactcctctccccacccctccgaccccagtctccggtgtccgaaggggttgtgcaccctagagttgccgctttttgagaaccggttttacctccgcccactccttcgtcctctagtttgggacttccaaacttctcccctctcctccccgggcatagtgcgcgctttcatgaatgatctggtcacaaaacaaacaaaaacgaatagaaaaagaaaaaaagagaaaaagaaaaaaagccgaaaacttcccagggtttgccttagaattagcaggtggggatggaccccgttccaccacgagctcctccagcgcccggggctccggcgtaccctacgcctctgcgctcgcggccccgccccgggcctcccgtggggctttaatgacataagcaactttcctcgcgcaccccccgccccgtcttggtacggcctgtccggcgctcgacgttccacccccctctctctgctctcaggttggttcagcccccgtctacactggggtggtgcttagccggcgccagaccgaccctcgacttcggagaggcagcgcggttcctctgggtgcttccgcctccccttctcctgcttctccagcctcttcggcctcctcgcccgccgcgggaacccgagaccccagtgtatgccccacccctgaccccgctcgcgacatgtccaccccggctcggcggcgcctcatgcgggacttcaagaggtaaaccgaggggacggccgaggccgggggttgcgagctggggcacagggcgggtcccgaggcgcgccgggcggggagggctggggagcggccgggagcgggcgccagtgccggcctagggggacccctgtctgtcttcccgaaggttgcaggaggatcctccagccggagtcagcggggctccgtccgagaacaacataatggtgtggaacgcggtcattttcgggtgagtctgcgttcgtggcggtggcgagaaaactggggacgcgagcagcttcggtctgcgctccggggcgggccccccgcggaggccgagcgggtaggggaaaatgtttgggtctggctgggcctaggcgcctccccggagcctgtgcctcgattagctcagttcccgctgccagggggaaccgcttggggttctaggggggcggggcggggagtggtggcggttaggcgcggcggcttgccctgtgtctctgagcccgggacatccatttgtagtggcttccgaccccggtagcggtgctggagatggcagagctcgggatagccatctcagatgaagcagggagaagggggccccttaagtgggaactgaccatttttctctgtgttgcaggcctgaagggaccccgtttgaggatggtaagagagagtttc

SEQ ID NO: 71098 - DNA, 1896 bp, Homo sapiens
ttcatctccatccctggtcctggagaggccgcttccgcgatctctgcaccctcctagctgttatgtcatgcccagccaccacagtcggccaccccacccccaggccaatagtgatccctctagtgccctccagcacctccaaatctccagcctccaacctatcctccgcatcccgcccccgtccctatcccaaccaccatcatcgatccctccagcgccgtccctaacccgatcccccatcaccgatctctcacccccgtccctaacccgacacccacaccttcctcacctgcagcccaggaagacgtggttggtccaggcggcggagagcgcgaggagctggtcgagggcagccccgggatagctgtgcaggtgccgacagatgaagctgcgccgcagagcccactgccagtcactttcgtggctatagcgccactgctccagcactggctcgggcgggggcggcgggaggggcggcagcggcggcggcgggagggggggcagcggcggcgcgacaggaagtcgccccccaacagcagacgtcctccagccatcttctccgcccccaagcagggaccccagggacgaagccgactacggaccgcgagctaggcagctagcaagcgggcggaaacggggggccggtgggaggggccgggtaaggaggggcgcgctgaggggagaagatcaactctcggggggactggagtgtgtgcgtgggggccaccgttaggaggaaaagaggagcacgagctcgcgtcccgacactgggatgcacgtcccctacactcctctaactcgtggaggagcagaagggcttccgccgcactcacgcgcgagccggggaggccgagtcaggctccgcacctccacggatccgcagacccacgcactgcgcggagagcgataaaagaccccagcacgctctgctcccctcctctaggttctagcctacctacccgcgtgccgtccggggttgtgaggccagtgcgcttgcgccgcggctgttccctaacttccaaatcccgtcgcagaatctcgcgcgacgtacttttttccctccagtgacgactacgggcctttgacgcactacggtgacaagcggagggcggggactccagaaagggaatttaggaaggttctctgaggttcgagaatatggttagaaggtgccctcagatgaatgttggtagcccacggctcgtctgacgcttttccctggatttttaagcggcgcgacagtgagaccatgttccttgtaagggatttaggtctgcactggactttacattaaaacaaaacaaaacagtcagctccccgaggtgccttttcttcagagagtagcttgaaatgctctgtgcatcgtgcatcattagctttgtgtaatagcttactgcggaaacgtagtaaaaatgaaacacttgccaagaaaatcatccacagcgccgcttctcaagttagccagtttcaagtccatactgtatcccaattacgaacacagatactgtttacacagttctgatcacgattgcaagtctgtatttcacgtatcaacttaagtgcaaaagattacaagatacaaaaggggcccacagaagagggtactgcaaggtagagccgctcaatcactgtagccaaatgtatcactccacccggagtcagcttcactcaataacttcagtccctatctgccaacctgtgtcacgaaagcagttaatcaatgagtgtctgtcggcgggaatttacacagcacctactgtgtgctcaatacagcaagagtacaaaaaagaaggaaagaaagtgggttttctctgttgtcctggaattgactacaatcttggtggggagaaatagccctgcataaaactaaatgttccaccaggagccggaccattg

SEQ ID NO: 71099 - DNA, 2796 bp, Homo sapiens
aaaaaaaaaaagaattcctaagctagccacacttaggtttattctctagtcttctgttcccaaaccctgaatacatgttccttggaggaaacaagcagcaaccagatgtccaaggtctcctgagttaactccgtcttccctggtgaattacaacttattgcagacacaaaggagaacagagagacaaatgacacataaacaggagcttcactggctgggggaggggggcatggagagtgacgtcagttttcccagaaacccatttatcacgataacaaggtctcgagtgcttaggctgctctttcagcttcagaatctggcgtacaattatgttcttcatcatacagtatggcaaggccagccagagcaaactggagccatgcaaagcaaaccaagtggccctaaagcaccccctcacccccatctgcagaacaaagggcatctctaggttgcctgagttgtgcctgaggtgaaacacacacaaccttctggaatgttccccattgcaacatctgccctgcaatcctaatccaggcaagagaaactggtgagagtatggaggacaggtcgatgcaaattcattagctgacatgaaaaatcattagcgtcatttttggatggagctagtgtaatcccagagattaattcctctacttcagctataccatctctgaaatgcaggtaaccaggagcagaaaagccacagcagaaaagagggagccctcaaaacactaaagcaataaacaacgagagtgccaatcttgggggaagaaaattctctcaaattgcatcatcacagagaatgtcccctgtctactcctggtccttccacaacatgactgcataaagtgctctgtgctagggtgtgcagggggtggaggaggttccgaagaaatgatcctgcccttccaaacagggacaaaagagacattaatacatattctgtagagaaaatattatcagattctggcttcagattttgtaaaatcaatttcaattacaccaaatacctagaggctttttttttgtactgtagttgcattgcatgaactattttcctaaataagtaagctacaaggttgaaaaacatttttatgtggttcagagattttcgtcaagtagtatgtggtgtcatgggatttgacctacctctgtctcccactccttcctcacctcggggtgctggtgggcttattaaagtcccagatacccatggatgaatagaatagctagggtgtcccccccaaatggaattcatcgccctttgcaaccaaacttctggtttaaaaaacaaacatggagcctcaggtcacttcaacatggtttctctgcacatcccaggctggaaaacttcagttctttaaatgaagattttttttttcccagagtcggtcgccaacaaaaaaagagacggcaccgcttttgcgagtctcacacttattttcctgagtctccatagaaagaagccagctccacaggttttggcacacaagcccagttacactgaacatgcacccgagacagatcctcagaggcccgctccaaaacatgccaaaatacgcagccagccacctacaggccagccaactgcaccccacactgacgcacaaatgagacccagaggcacacagcacaagcagacagagaggcgttcggacacacaccacagaggtgagcacactcagagaaacacgcggacttctttgggtcacagacagaaccccggcgccgccgccgcccgcccgggaagacacgagcgcgcgcgcgtgcacacatacgcgcacaccgatacacacacagacgcagtcacatatgtaatgcatatagagaaaccctatcccagccagtcacctccccgcccccctcgccactcaccgccttctgccccaggctaaccccagccccgcgcctctttgcctgtgcggtcccgggtcacaacgggcagccgtgcgcaggggcgcggcaaggccagggtgccagggacccggagggctcggcggctcctacggccattcattcggcaacgccccagccgtggggccgcagctgcagcgagggaggcggtggcgctcactgcggctcttgggcaatgcaagttcagccgccggcccgcaggttttgcctgcccccctgccgccccccgccccccgcgcgccaccaccgttttccgggacaggctgagggactgagctgctgaccccgggagcagaagtcccaccgtgcccttggctcctggatgctgcccactgccctcctcgcgatgtggcggcggcggccaggtctccttgaccctcaccaggccctcggccccggccctggcacccaagctctgcacttaccacctggcgagctatatcggtcgctgccatcgctcctgcgtccgccagggctgccacgggtgccgccgcaacgggagctactgcacaggaaacagaggagctcctccgacaaagagaaagtgttacacttcgggcgcgaccaagtccggtggggggaggtgcaagggaggggccccctcgccgctgctccaaccccaacctcccctctaccgcccaccccttgaaagtagggtatggagagggggcggatttaacgcgccgcttccccctatggccagaccagttccagttcttcctgcaaccccagccataggcttctacgaaggggggcgggggctcccctcggtgaccacgtcctctgccccccccgccacttggctccgtggtacgtcccgacctctgctgaattgtcacacccccctgctctcctttacatccctaagtccccagaccccga

SEQ ID NO: 71100 - DNA, 1814 bp, Homo sapiens
gagccaatacaaagaaggcaaagattacaccccgtcccccatccacagtagcagttgtaaattttgtcaagtaataaattacttgacaagtaataaaataccagtacttatcgcctccatatctagaaatcaacattttacatttcccagtaaagagtgactggttcgctgctgccatttactaagaaggccagaatgacacacaggttcgcaaaacaccccttgttctaggcgcttccacggggtgacgctcaagtctctgaataaacgtcctctaaacaaaagtcctgggatctaaaaatgcggttcgcttctccacgccaagctaaacccttttcgaaaaccagtagcccacaataccctcctgattaccctccacgttgcgcatgccacgggcagcccacagtcaggccacgatttcgggggtggctgccacctcccaccccccgcctccagaacgagttcgctacaagcgaagggaaaccggaatccctgcccgactcggcagcggccgggcaaagaaagagcccccttgaatccgcggccgcagcgcagcccgtccctctccaggttgctcgctggctcactagcttccctccaggccacgaaagacaacagtggccgaactggatattttcttgaaaaagcctttaaaaggctcccgcccctcaacgctccgcgcggcccaggcatttcctggcagcggcctcgggttttgggaagccaccccggggccgatgggggccgatggacttaccatggcgagcagcggagtcaagaacacaccacgatggcggagaaaggaagaggagggaagctggcggaagaacgagcttagaaggcgcttccgatgggcggagtttaggaggtgacgctatgcaccgaccgcctcttctagtgccttctctgtctagcggtgcgctcccgtggcgccgtgggaaagcgcgctggtttctgccaaatgcagttagctttgcttcgcttccctaagtgcgttcccccaggggcccggcagtgtgctaggggcaccctgcttcgtaagtgaggcagacagcccgtgataaatgccaaagtagaagcccctccgaaaaattaaggagccgattgggcgggactaaccctaagggagggcaggggaagcgaccgtcacctccgggcgccggggactcggaacgccgggtcggagctcggcaggcggagagtaagtgccattttcccagagggttacgagtcatttcggcctggctgggaggtgtgggaagggacagtcgtgtcggaggaagccggagaagttggagggggttggaccacgtggacgcttatgtaagcctaggggttttcgactaggcggaaggttgccaatcaaagttttcaactcagaaagttagggacagaacctcttccttggctgctagaagtccagcctgacattgtagcccgcctttggcaagatgtacaataattaataacatgcgtttgggatgctagtgttccccattttcatccttttccccatttaaaagcaaaaacctttcctttttgatgagtaaataaaataaacataaaaataagctgggcgtggtggctcacgcttgtaatcccagcactttgggaggcctaggcgggcggattacttgaaacgaggagttcgagaccagcctggccaacatggtgaaaccccgtccctactaaaaatacaaaaaaactaaccaggcgtggtggcgggcgcctgtaatctcagctactgcgggggctgagacaagagaatctcttgaaccctgaaggcggaggttgcagcgagccgagattgcgcc

SEQ ID NO: 71101 - DNA, 596 bp, Homo sapiens
caccatagacatcacaattggttcagcttacacaattctgactgaaaaattaaaagttgagcaaactttccacttgatgggtgccaaaaccagatcagctgcagacaagaacagagatttcaacggaaattttaaacaagtgagatctattacgttgctgcatattaattgtggtttatgccatggaatgtcaaaagccgcaattacgttggcaccaaccaatagatcatgaagcatctattgggaaagtgtaacgggaggtgatacgtggctttcccagtatgactctgaagacaaagcaatatcaaagcaatgactctgaagaggtggaagagatccagtcaaagcaaaactggactggccaagagcaaaggtcatggcaatagttttttgagctgcttgagcaactctccttattgactttctggagggccgaagaatagtaacaccagcttttttttttttttttttgagaccaaatctcactctgtcacccaggctggactgcagtggtgcaatctcggctcactgcaacctctgcctcccaggttcaagctgttctcctgcctcagcctcctgagtagctgggattacag

SEQ ID NO: 71102 - DNA, 1315 bp, Homo sapiens
aataggatgctctcgatctaccctcctgtaccattaatcaccctgcactctcccccaactcgcctccatgaataatattcccatccctcatgtctccttcactatttaatatttctccccaattacacctttagttcctcattctttataccgtcgctcttccctcccattatcatctcacagctctgacctaaacccttcccgtttggggagtcccctcttttcctcacccccacccaggatttggccgggaggggctctccccatttcgggtgaatggatgaaccaggatgatgcgacttccattcaggcgaagagatagaaggagaacctgagaaagaaagggggcagccccattcccagccatcctccccgcgctgcggactcgtcccgccctctcccgggccagcggccgaccgggcaccttgctcagcgcttctttcttctccttgttgcgatcctgcttatcttcccccttggagctgtcccccgaggtcccaccaccgctgcctgtggccccggcgggggttaacagggttactcgcttctccttaggcctgtgctccttctcttccttcatggctacgtcccccgctgaagcggcttggccggaacggggttaccccgggcacaaacggctcccgggaagctcccgtcaaagctccgcccccaacaaatgccccttgtgataagtcgggccccacgttccattgggtcctgccaagctctcgcgagacttgggcctttcccagtgcaaaggttttaacacctggtttttacttcccgcccgccaagttcctgcgccacccaatcccctcgcggcccagactccctcggggcccgccccttcgcgcgtcattagcaattccgccatcttgaagtgactctgtcggggactacaaatcccggcatacaaagcagctacccgcttttgttgggcgttcaggggccagagctatctcagggtccctgtttgtgagtaaatcgaatcctttcatcttcagagttttccaggtcgaaagataggttcttcacgcttagtttccatcagataaactcaatgccgtccaaattttgcctcactaggggagcgacttgtattttttatcattgaattcagaggctttagcatttattttcctacaactaaaagaaaaagcctaacatttaaaaaactttattttccttatattgattaggatttacagatacttagtaaatactacaatattagccgagttcagtggcgcacgcctgtagtcccagctgctcgggaaggttgagaagagaggatcttgagcccaggaattcgagg

SEQ ID NO: 71103 - DNA, 2270 bp, Homo sapiens
gaccctacttcaccacccgcctgctctgtcactttctctacaaaggaaggacacgaagtaagacttccaaaagaacaaaacgtttattttttaaatttaagaattatgggaaacctaagtaatgggaattgcatcctcatcggggtcttctggcaagtcggaagcaccaccctctcctgtagctcgatgcttctctagtttagcaatcaattctttcgctggattgaagacgccattggtctgctggtcacagacatagcagcgcggggtggtgcggaaatgctgcagtgcacagctctcgcagaaataatgcctgcacttggtgacaactgggttttggaagctctggcgacagatgaaacacttgaatggtatttcctcatcatcgcttcccacttcatagttttcatcctcatagacaccatagcgaccctcatcaagctcacgttcgatctgccacccatgcttgtaatctgaacggtcatggaggaatttgcagctgtctccgaagccgcagaagccagtctctttgtagtccttacagatgtcgggctggtaatcccagcgcacggtggcacgtagatgctcgggcgctcggatggggcccttcctcaccatcccggaagaggcattgcccatagacgtatccttgggcttcatgtatttctgataattgttgattccccgatagatcttgtcatcctccttgcccctcagctcctcctggatcttctggctgcgctcaaagatggcttgtgcatcgcgctctttctctgtgtccagctcatagacagctgtcgctcccatatcctctggtcccacgggtttcgccgaacgggtggatttataaaccacgccgagactctcgggctcattttcctcttcctcttcgctgctcaagtcgccgtaagccgccttctgtttaccactgtcacgggtcttctgtatcattggattgtgggtcacccgcttcttttccggtcgaaccacagtgcagccttcgtcgctactgctgccgctttctccgggctctgggtcgcaggccgggcgctttctgcgtccagcagcccctttccgcccaggctttttgaaaaggaaggtgcacacctgatccaccgcctttcctggagaaagctgctctgccattttagagtcctgagctccgaaacagccgtggctgcctgggttgcacttggcccctgcacgtcactccacgttgcgcgctccgccgggagtcgaagcaaaagacactgacggaagaggactgcgagagcccgagcgcccgtctctcttgtgccctagcagattccgtcgcttcttccggagccgtacgtggcaccgccccgctcgcgggcggccgcggggcttgctgggaagagaggcgaagccaggtcacctttcaaggacccagaagtagggttttggcctaggtaacggggcagagatgtggttcgagattctccccggactctccgtcatgggcgtgtgcttgttgattccaggactggctactgcgtacatccacaggttcactaacgggggcaaggtaagccggcttcggcccgggggccgactccacgggctgatttccgaaaagggtggtgggcagggagaccgtcagcctgcgaaccctctctccgaggtcggccctctacttgcttccggttgcctagaagccgaggcttgcgaaacgaagcccgatagaaactacatcctgctctagtgaaaaacagcgtttctgggtgtatcagagtgggccttagggcagagtagcgacgcgggggccgggaaggtagattagaaaaggtggctcaagcctgagaatcgctcactgcaacctccgccttctgggttcaagagattctcctggttgggcgcggtggatcacgcctgtaatcccagcactttgggagaccgaggcgagcggatcacctgaggtcgggagttcgataccagcctgaccaacatggagaaaccccgtctctcctaaaaatacaaaattagctgggcgtggtggcgcatgcctgtaatcccagctactcgggaggctgaggcaggagaatcacttgaacccaggaggcggaggttgcgatgagccgagatcgcgccactgcactccagcctgggcaacaagagcgaaactccgtctcaaaaaaaaataaataaagaaagaaattttcctgcttcagcctcccgagtagccgggaccacgcctggctttttttttttttttgtagaggcggggtttcatcatgttggcgaggctggtc

SEQ ID NO: 71104 - DNA, 1525 bp, Homo sapiens
agtctcatcctggcgtcatttttcgaggtcaagactgagaccacttaacaagaccttcctcaaagtggggtcatctatagcttatcagatcacttttcctacatgcatctaatcgtcttgtctgaggggaaggtttatttcctctccaacttaaacccttgatttcattccttcctaattccccacaaaacgtttctacataaatatcctgttatctcagacctgtaagttccttcattcaacaagcaatggttgagcgcctataaagtaccaggcacttagaattctgtgatcagaattctcctccgttcactggctcctcctttccatgagctcagtctagtggggaatacaaatatattcacgaatgataatgacacaaccaggtaaatgctacagttctggtaggtctgaactctcggcaatattcgctaacaagacaggaggcggaagggggtagcgggagaccagggcactatatgaaggggcctgagggtaagggaaaatgaaaaggacgaataaagggttgtcgtgggtggattaaagaaagggatgaaaatgggcgcaaggcaagcagagtgagcgaaatgcgaatagtcagaagcggaatgaatgatagatcggactccaaaggcacgtaggctcgtacaagagaaagtgcggccgtctcactcacttctgccgcaggctctcctccctctccttgtcgaggaggctaggccaaggcttgtcgctcccgtaggggcgcgagtagctgccgtaatagactgacgaggaggcagaagcgaaggggatgccccggggcgcagagggccgctctctagaacgcgaccgcgagcgtgagcggtaggactggtttcgggagccttggctgaggccacccagctgatgggtgagtccattccggtccccggaccgagagcaagagtgcgagcgagagcggcggccccgcggggagcgggcagatttgctgggcttcggactcttcgacgaactgcgacgtcttccccccgagcccgaggcctccctatccgggctgcgtgagccggacaccggagccatggctactggggggccccagcagccgtgggacaagggggcgctctcgcgagcctaggaagatgtctgttgccttggttcccgggacctgccgctgcggaacagcccaaatctgaggaaaccttggacacagttctgggtacttctgcaaaacccttccccggatctaggcggtcgtcaccgacaggaagcgatgtgtgcatcaatataaataagccggtggggcaactagattgcgtgcatccttccagttccgagtgaggctcctcaagtctaagcaagagaccaagttctttctcagccttgaacttgaaacacttgaagggaagtatatatttcaaacacaatatacagtatacatttcactgagtggccgtatgaacaagacagttaattctgcttgtgtttcctgtgctttctgtgtgtatttatatataaatgtgtgtgtgtgtgtgtatgtcatgta

SEQ ID NO: 71105 - DNA, 1046 bp, Homo sapiens
ggtagaaggagcgaaatgcaaatggtcagaagcgggctgaaagatgaagcggactcgctgaaggcaagtgggctccttagagcgaaggtgcagccatgatctcactcacctctgccacggattcacctccctctcctcgtcccgtaggagcgtgagtagttgccgcaataggcgcaagagcaggcagaagcgaaagtgatggtccacggcgcagtcagccgctcttgagaatgcgaccacaactgggagcggcagggctggtttcgggagccttggctgagcccattccattccccagtcagagaacaagagttccagtgagagttgcgccccagcggggaacgggcggctttgctgggcttggggctcttggacaaactgcaacacattcccccgcccggagcccgaggcctccctctcggcactgcagaaccggacaccggagctactgcagcctcgaaaacgggacattctcaggagcctcagcagtatccgttgcctttgctccaaaaacccagcccgcgcaaccgctgggagcaaaggaaaccatgggaactattgcgagtacgttggcaaaacatttccccaggtctgtgtggcctccggccaaggtgaagaggtgtgtgtcttggtgtaaataaaccgctactgcaaccgatttcgctcatcctttggttccgcattgaggctcgccagggtctaaatccgcacagagactaggtcttccttaggcttctacttgaaataactgaagggcaggacgagagtccactggagacatttcacagaatggccatatcaacaacatagacaattctgttcgtgtacgggtgctttccgtgaatgtgtgtattacatgttctataatattgggcgcactctgtgtcgtgtgtgtgtgtataaaatatgtacatttggttatgtgtgtatatatgtacatatataataaataggactggctcaaacagattcacatattttttcggagtctatttgaattaaaagaaaaatctgagatgggaagaaaagggacaaagtattcaaag

SEQ ID NO: 71106 - DNA, 1833 bp, Homo sapiens
cccgttagccctccggaaagagccgaacacacaagagcttcccagtcttcctccgcccccttgcggaaagaaccgaaggcagagcacggcgccgaagtggagccgcctcaagctcgggcccttccggaccaccccggcctgcgctcggaagaggagggcgcctttggcttcagcgcttcgcccccgcgctgtgccctctgtcggcggcgtggggcagctgtagcagcgttggcggcaggaggcggcggccgcgtcgacgtcgacccagactggagcgacgtttaaagaaggggcagaatcgctggggagtgcggcttcttcttgttgggggactcccagccttccgcgcgtccggaggaggagaagcggcggcgccgggaagcaggtgaggacccggccccaatcagggagggggcgaaggagcgcgcttgccttctccgtccctgggccgcgcctgcgtttgcattcgcctcacttgaaccaggaagcggcagagtcggaggctcagctcctccggctctttctttgtgtgggccggggagcgaaggaggggacgagccgcgagggccgcggcgcggtccccttcgccgttaggggccgaggggctgccggtgccctgggtaggccccggggcttggggaatccatcacagagacccacttggcttttccctcgcccctctcgctgcttttttgtgcctcttttactcccctagcccctactttgatttagagcttttctgccaggcccatcctccccttccgtccccttcccggggcacaacaatgccgcctgcttcgcttcatcccccccccaacaccccaccctgccgttcgccaccttctactttccctggtaccccatattcctcccgccctcactctgctgtttgtacctccgtctgtatttgcaagaagcttgctttgcacgtgaattggggttaaaaacctcggttgcagctggcagggtccatatggggaagagggaggtggaggaagggagatgaggttcagctgccgcagggagccgcgtgtcggtttgtttcactccctcgcggatggcttttatctctttccaccgtcaccagctcctccgaactggccctcggtcaagggtttcacagtgatgtggaatggcttttccacagtcgaatcgcatatcttcggagtgggttcagaccgacttgtgctgtctctggggccaccctgagtgggaggagggggacacataaacgaaacgaaaccgagtcccagtgtcacctggacacgtacatttgacgcattcccatattggaagaacccgggagcaaatgacaaaaattgcgtgccgttttcagaaaacctgtctttccacttaatatcgacttctgtcgaaatgcccgtatttcggaagccctggtttttggcaaactgtccaaaggtcaccctttctgatgatgaatgcctttatggtaacctggaattccttggtactgttaacatgcaacaccttctaataatgttttaaatcttgatttttagactttttgcctgctgtttgttcttaaggtatcattttgaaaaatttagaaggtatttgagacagaactgccctccacctgtatataacttaagcattgtgacatcgacacccttttggtaacttcaaagggagagaatattaataaaaatatttcttcactaaaagtacttgtcaactaattgttaatatataatatccatatattaaaatatatccatatataatatgtatggatattatatatttttaatatatgggtttttttaaactctggcctctttgttactggaaatatcttctgcaaagtgcaaa

SEQ ID NO: 71107 - DNA, 1176 bp, Homo sapiens
aaatggtagtgctaaggtttcatagaggaggagacatttttgtatgcgctcaaaagatggattagagctcagcaggcagggaactaatacgtattgagtcatggctggaagaattcacttacctggatgacaggttaatgaactcaccagtgttgctaaaacaatcttccatttcaaaagcattttaagttaaagaagcacttgccccctactttggtcacaggaatactatggagtttggtggaattcatatcattcccatttgatagacaggaaaatgaaggcatagataattgtaaagatgtatgccctcttatagcaagttaatggtaggtctgggactagctctcgggtcccctgaataacagcttgagttcttttagccacacctcgctgcatttgtgaccagtgctagtagaattgtgacctccaagcaacaaggacttcattgttgccccctagagaagaagttctctgcaaggatggagtgagaagtcttatttgcggaagagctgaggggttgaaaataaagaagggaaaaccaacagtttccttaaaatggacagctgcttctaaacaattgcttgctcccctgagacctcagaaaggtaagctctgtggtctcccctcaagagcttcatggaatcatgtaatgttcagacctttggacctccatcttgattccccattacctgaacaaataactagtttgctttgttttggctgtcctccacttgtggaaaaaaaaaaaagacagatgattagatatcaaagtcagattcaagggcttttttgaggctggactcttgtcacctatgcctgttcccattcactgtcccagacatctaggacaaaggctaaaaaaattagtcattaggtaaatattaattggacatctactctggctggcagtgtgttcgatctgtaatttggaggccaggaggtgggatggggtatgatcaagaccactcaggctaaaggagctcatactacaattaggtaaaccagtccacaatccctttccataatcctgaaatccacaaagttcttaaaataaaaaagtgtttttttttcttgaatgtaactaacttggtggcaaaacctgatcttgaactgatgtgaggttatattatcatctttatctcacttagtttaaaaatccatgttttattatag

SEQ ID NO: 71108 - DNA, 1121 bp, Homo sapiens
ttgacagaaaaagctatatgggaggactttgggctccacactgaaccaagagccatcagaaaatgcagctgtatagaaaaatggtttctatttcatcctggaacctcttaaaaatcagatctaggtacattattaatatttacttttccaaatcctgctctgaacttggaggcggagggaatcaatcttggaaattttccaagaggaagaatctagttagtcctgatcaataaatggcaaactagcagatgagctgatgggttcttttatgtgcttctttttgcatgtttattttctgcagtgagtaagcattgcttttgtaaaaacaaaacaaaaaagctttcattaaaaaacaaaaaaaaatttaatgacatgaaagccaacaagtaggacaactattatttttttcactttcccaaaacaataacagtgttgtatttgtgcacagattcaattggcagggaactactgattaacagatgccttggtcagatgtgttctagtcactgataaggtactttccattgtaaacaatcctttcttagggtcagttggccctcagtaagtgctccaaggtacagttaaggcttccaattaagtattcaagcaaagcctgcctcaaggccgcctttcagaagtgctacagaagagtttcctgcgcgctgtgaacagttggactacatcagggattcccaaagttttggtgtcaggacccctttactttcttatccactgaggacttcacagaggtttatgtgagtcatatgtattggtatttacagtattagaaattaaaactgagaaatgaataaaatataagaacatcagagtggtgaggtcatcacatgttacgtagccactggaaaactctgctgtacactggtgagaggatgagagtgaaaaggacaaaggacaaataacttctttttttttttttttttttgagacagagtttcgctcatgttgcccaggctggaatgcagtggcgcaatcttggctcaccgcaacctccgcctcctgggttcaagcgattctcctgcctcggcctcccaagtagctgggattacaggcatgtgccacgacaccggctaatttttctatttttagtagagactgggttt

SEQ ID NO: 71109 - DNA, 1618 bp, Homo sapiens
cggcctcccaaagtgctgggattacaggcatgagccaccacgcccggccccatccagccattcttaggccctggtaacaacccaatccttagcaagtttgtctacctgctccctgcacccccaaaatatgaggtaataggctagctgtgtgatggggaagaaagaaaagaagaaactctgaaggcaaagaggtagtctaccaaactcaaatactccacccccaaaacctcacatctgggaggccctcctaactgaaacgtctggggatttttttgtcagcgtctggctgggaggaagtagcaaaactgggagaaaatcgacatcctcaatacctccaagtcagatgtgcactccccatcaaagttccccctgaaccccttagtctccagaggttgggtccaagttttctttcctggaaattgccccagctaccttaggttccttcgcccttaaaactatgactaccaaactcaaacccagcatcactcctaatctcttgaatcatcctttcttcacagtctcaaattccaaccttcaaaatgcccaaccctgtcactgcccctgcccctcaggctctactgtcctatctgtcccatctgtcccccacccacacacttctcccaagctactccaggcaggcatggtcttctctcttaatttcctatctcaccccatagtttttccaccatcttcaaaactcttccctgatctcagcaaaccaagactctcctaattgtctctggcgcccaaaatctgcatgtaccaccctcctacgctcactcctcagtgttttccccaagttactctttccacgctgaccctctccacgcttcactcctcccagcctactccctcggcgtccaccccccgttaccggccccttcttactctcctgggcccttcttccccgccatccgtcggtcaggccttctctaggtcaccgcttgcctccccgggccaaccgccgccgcccagtgttagctgctgagcctctcaaccccctccccctcggaccagtctttcaggttgtagctttgaactggtgccccgggcccaggcggacagactaatcgggagggcccgacaactcacccaggactaggcagaccagaacgagccctgagcccggaaccgggaagaggcggaagcacaccatgaccccgcagagcaggcggcgacggcggcgacggcggcggtacaacaacagctgcaacaccagggaaaaggctcgctggacctgggtcaagagcactgatgaccaccgaccacagccttgcaaaagccaggaatcggcgcttcagtgcgagtcataagactaggggcggggctctttcttgcttacagccaatctccgcgcttgaaagcggcgagaggggtggtgatgtagcggccggtgggcggggcgaccacgccctggctttttggttcacagcccttcctatgctcctgagagatatgcgcggacggcattttctttttctttttctttcttttttttttttttttttaattttactttaagttctgggatacatgtgcagaatgtgcagctttgttacataggtatacatgtgccatggtggtttactgcacctatcaacccgtcatctaggtttta

SEQ ID NO: 71110 - DNA, 1091 bp, Homo sapiens
ccttctgtgggaaatgagggaggagcctcatgtcaagtggttatttaaaacccatatcttgtcatttgtgggcttgaaatgaatttggctaaatgaattgactaaattgaatttttagaaatcaaatcttgatcttcatttttaaaggtttaaaatgtatttgttctttgtattgaatggaggaattccgtttaaatgttcaaaactggtaggtaggactgtacaagaaaagatgaaggcggtgatgacaaaccaataaattcaaggaggccgtttggagaaatcgctgagtcaagagtacggcaatcacgtgaagattttaataaaaacgaaactaatcagacgcgtttagacttcccttccctctccacccacttttggtcttgttaaagggaagaggagggtcggttttaatcaatccttcggtttccctactgggcggagcactgagaaggtggcggaaggaggggcaactgggcccggctggcgcgccttcaggcacgtgggtctgggttgcggaccaggaacacagcgatcagggcgaaacattggccttttgtgtctcttgcgtttggtacgttttgggggccggctgcagctgtgaaaggccgcactcgctgccagcggtcaaggcgaccttgttcagcaaagccactattgtactttgagctagtgactccggcggcttggcagctttctaggcattcctccaggacctttctccccctggaggcctcagctttaaatgcagtttgtttttacagttggatacagctctattcttggctttggcgccaggagtagcttgcaatccttgccagttaattgtggcctctgcgcgaaaagaacgatgaagtgctgcccttttatgtctaaaggtggcgcttcggacttcgctggcagtagctggcagtaggtgctttgaagtctttcttcagcgaacctactcatctggtggcctttatgcgagcatgaacctgcaccaaagccactaggcttagtacctgtcctgggttggcatgtctgtgggtgccgctgtagctataaatgactttgattggcataaacacaattgtttcacatgtgcactt

SEQ ID NO: 71111 - DNA, 903 bp, Homo sapiens
ttctaactttgattagcaggaggaaaacatctgtaccaattgatttttttggattatgactctggcttgatcctttccctctcagagacagcttttgctttcctgttggtctcgtgtcctgaaagcttagcttggctttctacctgtccgggcacacaggttatcaagcctgtatttgcaggcagccaactgaaaggttggcagcccccaataatatggccggacagaaatgggggttgcaccctacttgtatctagggtcctaccaactgttgccagctctcagaggattctctgtcttttggctatctctgggagtggttctggatcttggcagttggggggagggctgtatctttgcaccctctatgaagacaccccttatacccacagttaagccattaagggcttattggttttggtcaagtcactcgataaatataactctgaaaatatccccagtggggtgacatgaattgcatgccaggttctggacagaaatatagttaaaaattaatcaggctgccctttggcccactttccttttgctgaaagtcatgtagtactagatactgactatttgcattcccattgttcctatagataggatctctgacattggaattataaggctttcgtttaaagactgcttaagatattctcaggatcctgaattctagtggaaaggctgaagccaaccagtttcaagaccctcagagaggaaccaaatcagcacaagaatatacttgtttctttttttaagatagagtcttgctcctcagccaggctggagtgaagtggcacaatcatagctcactaaagcctcaaactcctgggcttaagtaatcctccagcctcagcctccttagtagctggggctacaggtagataccactacacccag

SEQ ID NO: 71112 - DNA, 1756 bp, Homo sapiens
atcccagcactttgggaggccgaggcgggcagatcatgaggtctggagttcgagaccactctgaccaacatagtgaaaccctgtctctactaaaaatacaaaaattagccgggtgtggtggtgtgcaccagctactcgggaggctgaggcaggagaatctcatcaacccgggcggtggaggttgcagtgagccgagaatgtgccattgcattccagcccaggcaacagtgtgagactctgtctcgagaagagaagaaaaaagaagagaagagcagagcagagcagagcttaaaggaaacctcttacaccacgagacaagtcaccacacctcatcaggaaacagcaggccaattagattgagcagctatggaggaataagaaggctgagaccctgctggcctgcccacttttcacgtgacctggggctaggccacaaatgcttaagggaatttacatttatttcatgtgcctctctgttcacacaggtcctttgtggactgtcccccttccacctttagtattcctctcattgtatctcaccgttccttctgaatgactgttttctcagcatttcttatcgctttgcttagattctgtcatatgacttagtgcgtacttcatctttccacattgtgcacttccggtacttctctaagtcctatttatcccatttccttctgctatgttcccttctcaaataaaacagttctcggcacatctacttatcttctcacacaagataccatattcccttactactcaattaggtcccacttcttccaataagttcttcttaattgactcagctaccagtgactcacatggcactcgcacccatcataccacactgacttagtcattgagtcaacactatttatctcccaaccactggacacttcttacacaaaactacttatctttttatgtgtatatcttgtctctctgactccttaatgacagaaagacattgtgtgttcatctatctataagttctttaatactttttgagctttgaaccaagtgaatacatgaagtattcaaaaaaaactctagcaatgtgtcctgcacatagaaagggcttctagtatgagaaaagttgccagaaaacgtgtaattacgattgagtgtgctagatgctatgatgaggataagcagagagatgaggcccctaacccagcatttaggggagggcaagtcagaaaagccttcctgggaagaggtaaagggacagagtcccaaagacccacagggaaacagataaaaagttagtggaaatagtgagaaatcgagaattaagctgggctttacagcacagagtctcacctgtgtttggctggagggtggtttaagaactttaaggcaagaaaggcaggagcatctaaggtgagttttgaggtcaagttcggagggaacattctgtttttctaatttagccttgactgcttaacctatagaccggatctagtcattttccttcctcaacaaccttccatcaagcttttcctgtactgtgatggagcaatctcgtaataggtataaataaacaaacaaaaagaactatccggtacatggtctgctatcatttatgtaaaaaaggaacaaaataaaaacatacacagtcgttttacgtatataaaacatctctggaaagatacccaaaaaactaataatgtctgtcacaaagagaactaactaggggactggaggatggggtggaagtgagacttctcactacatgctctgcaatactttcggg

SEQ ID NO: 71113 - DNA, 2220 bp, Homo sapiens
ttagcagagccaggtttgctgttagcaaagctagagacggtggtagaagatttggctaggccgtttgcatgatgcaccgaagccacagaagagattaatatactcttatttttaagttgctgctgctgagatgttgcagcagttggtgaagatgaggaggaggaggaggaggattcctcagccatcttcgcatcaaaccctacaaactccagggtgtcttcaaaacgcagcttcttctgtatcggtacgtggctggaagcagccactgaaacccccaggcagaaggacgaggttgaaggggatgccgaatccctgggttgtaaaggaggagtggaagaggaggaagaggtggaatcaaagtcttctctctcgttactactgttactgctgctactgctgctgctgtttaactttctcttcttggcagaggtgggcggagtggtgctggtattaccatcagtggcagatctgacctcctgagcagcagcagcagctgagggactgggggaagaaaaacctgttggaaacatgaaaatagcggggtcaacaggcagaggagcatcaaaaacctacgtttatatgcctgcgtgcgtgtaggagagaaggtagcaatgctagagggggaagggaagaaagaagagaggagaaacacagaggacgagaaggaaagtgaaggggggggctacaccgggggaatgggagggtttgggaaggcggataggctgacaccaggagtgagcagaacgaggggggagagcgaatgaggaggcagacaggtaaacggccgtgccgtccccctcccctgcttttcgatctctctccccccctttctgcaggagcgactcagcgagtctgtgaggctgcagctcctcctccttttctccctctccctgggaggggagaggctgtggttgggggaaagggggagggggaaagaaccagggcttgttattgtcaatagcacaagaggctaaagatggcgccatttccggtcacgcggcgccgagggaggggcggtgtcaacctcagggagtgggggtgagggaagcgctgcagccgcccggggggcgggggagctcgcgcgtgagggggcggctggaaaggggcggctaaagtgccccagacgctcgcgctagttcgctcctgctcccgctccccttcgcgatcccctttcctggcagcgccttccttccctggcccaccgggaactcccactccctccttaacggtcccgcgggaagcttcgcgccgcagcgcccttaccggaagtgactgggcagacacttttcatagcgcccagatcccgaagcccccaggtccgcaggacttgagtgggggggggaaggggggagggagaaattggggggaagaaaagtggataggaggagggggcgggccttcgagacaccttcggagctcctgattggagctttctgaaggcgagggggtggggggggtggcgggaggagcgggaaggagcctcgggggagggaaggtagtgacggcgaggggcggagtgagctagctgggaaaacggaggaggaggaagaggaggagagagggagggacggaataaaacgtaagggtccgggagaatagaaactttgaaagagatgaaagaataaggagtggttgcaaggctaggggagtaaccctaaatagaggaaaacataatcatgccattatgcccgctgctggagaggaatgtccctatgttaagataggaaaggagaagaaaacgagctaagataggaagaaaaggactttttaattcggtgccggtataaattgtttctcttttatctcaaggcaccacagacccaaggctgaataaggcctgaattttgatgcctttctctttcatgtagctgtaaatccttttatcttactaccaggagcattttctaagctggctggccaaattaagtgtgtattctaaggcgaagaaatggaaaggtaactaacccctcacccacccagcactatgcccaggatcgtcctaacccccactctatcagtccttaactcagtaatttatagacccaacaaagctaagacccacttccttcttttgccaaatctcagtttacacgctgtcccaaaggagacattttagaaccatatcggcaaaagtcagtgttttctactaatgtgtttcatgaccccatgctttacaattgattattgatttaaaaaatctttaagtttggttaaattagc

SEQ ID NO: 71114 - DNA, 461 bp, Homo sapiens
aaaacaaaacaaaacaaaatacagaacagattcaactcaggtaagtgaaactgccagatggccaaaacaagttcttcaaatttccacagaactcattgacccagcaggactacatttttatccaaattgcagctgggagcttgattaactgagaaacaacacaattaaatgacatgacattcttcataggcaccaatccaatgtcagtatctgcaggctgaagtacagacagttacactgaaattgcgtatgctctgaggaatgacactaaattcgcttccaggaaaattactcaattttgtaagtaattttcagttttttttctcagggatatttttcaactttcactttaattttctttagttgcttagttgtacattttgagaaggcaaatccattggaacttggggaggcttagaacataaatcagtattagaagtaaagggaacacacagctaaaa

SEQ ID NO: 71115 - DNA, 1107 bp, Homo sapiens
tgtgtcagaattcttcctgatggtgatcctactcctggctgcaaaaatagtgatcaaaactcagtaagtctacacattttaaataaaataatttgcaaaaattattctaaggagattttttccccatcacagaggcaaaaaatataacactagggatgcatatgataggatactttgtgcagaaggaaacaaaactgcacacgagcacaaatgaaacagaaactaccccaatggtttttagatgaacctttttgggtgaaggtagttggggtgaagtacggaaaacgaagacgaaatagggaagagaagtgagagggaggacatggtaacctcgatatccctctgagggaccaagagagcgcccccaggaagaagactctcggtctcctgtgctgacaatcctcccgctgcacctgcccaagcatcccgcgtggagcatgctgggagagggctggggcccaggcctcccccaagagagggaggggagtcagggtgcgcttggggtgggggtcgaggccccgccactcacccgcgtctagaacggcttggggacaggaaagcgcagccgcgcacgggtttcctctcacgttggcgcaccactccgttacgctcctgaccaggctgttctagctgcaggcggtgttctctcgttggtctcgctaaaggtggggagcgccaggaaacgagcgccgcgaaggcgggggtagtggggcggggtaaaggagccggcggctgggcggagccgtccgtttgcccgcccgcgcaggcgtcggaagggccggcgcgcccgctgcgcgcacactgcgtgccctttctccccgccccctgccgagttcagagacttgctataggcctgcgtgacccggacgctctcctttacccaacgggcgtccagagaagaggccgtgcgtacgactcgctgacacctcccatttcaccttcctggcatggaaattgcgagagcgagagattcttgctcccggtgtcgctttttatcagacctcttgatggtttctctgatgtacccctgcgtccttgaaccctcatattgcccacccccccagtactcctgggctgagaccaaaacgcaagccactgaaatagtca

SEQ ID NO: 71116 - DNA, 1600 bp, Homo sapiens
caataaaacatgtgtgtataatgcctatataaatatatactgctgtgtttaaaaacaattacataaatagtatcatactgtatgtgtttttctcttactttttcctctcagcaatatatcctggggatttttcatgtccatttatacatgaaacattcatactaatccacagatggctgtgtcctggtacatttagcctttctctaatgagtagacatttggtatttatctcgtctttttctattacaaacaatgttccagcaaacatccttgcatctgactctatgcctcagtcttcaaacttctttgtataacttgtcatcagaaatgtgaatctaacacttcaggaagtaccaagattgctatgaatattagttttttggactatggctatattccaggaaactaattacttaaggtaaatcatgaaagagtccatgaattatggagctacacaaagatatttcacaaaagagttacagattagggaaatggaaaggatgaagcatgggtggagaaatgagctgagatagtgggaatagtccagataagcttgactatcttgaggaagtggtcagatttaaatagcaattagcagtgttttcactagaggaaaagtagaatattgaggtaagataggattatgtggcaaacacaggtttgaatgttttgataaattaggagactgaagagatgaggcaagggatttaagtgagggtcttaatgtgcaatattggaaattacaatcaaaatgcccaaactcaaggggtgcacttaggaatgatttgttaatacatacacaggcctaagaatcatttttatggaactcatttcctgtagggcttttctgaaagaacactgtgctcctttctaagcttatttttctttgttctgatcgtcattctgcccttactcgctatgtttgttgccaagatctaggaggcaaaaaataggcaagagagcatgtcacagtccatgactagacaagctgtgtgactcaggaggccaaacaaaggtcagggcacggaaacctgccttggctgtgctcttaagcaaatgaatgggtcagttggcctatcttttacaaaaatttatctgtttatatggcaatgtgcattttgtaattgttcttttctacatgatcttatgacatgctgattctacttccattataccactgattttattctgacttgtattatagttacttataatttgaggatgcaaaatggtggtgtataggtcacttctagcctatagatatgcttcatttggctaacacaagctcacattaaaaaatagttgccaatatttcaaaaataggaaggttcatacaaaaatatgcattcctgatttctcctgaaaaaatgaaatctggcacacagggccttcatttcctcatagcaacaactgactggaactgagcagtagctgcccttattataatatcaacttgatgttgaatctgaaagttggttaccatttttcatggaactgacattgttattcttacagtgacattaggaaaaaaaagtgaaatacttttctatgcccagtttttataaaagttgggaaacaaaagctagagtaaggggagagg

SEQ ID NO: 71117 - DNA, 688 bp, Homo sapiens
gggagccaggcagacagttcacttcacccttataaaactactctaaaatatgtgtgtttgtgcatgtatatgtgtgtgtgtgtgtgtgtgtgtgtgtgtgtgtgtgtgtgttttccttgttttcctttcaaccattctggaaaaagtcccatgtgctgagcaaacatacctggcaagtgacttgtgattttttgaagtaatggccagtgaggtaatacattgcatcacattggtttgcatcttttttgcctgacttaccctttttcatcacccctgttgctttgggtttgcacacactcaaatggttaatacttgaattattgttcagactctgttttctagaggaccctggcaaagacatttgatattagaagtggttctgtaaaacagacaggataggattttggaattggatttttcacttgtctaaaagcaatagggaccctattgctggtgataagtggtatggccataaccctggcatgaagtgactttgcaaatacttgagcttttcccgtggtatgtgctattttattagaatgacgtgtaggtggagggaaagatatggggaggtcaagtggctttgatgcctaactgatatataaacaatgttattaataaggattttggagtagaatggctgatttgaaggcagtagcagctctgcctctatagcagctttaaagga

SEQ ID NO: 71118 - DNA, 819 bp, Homo sapiens
atgatacccccctaccctccacccctcacagctgcagtggggcccagcttgcagctgggaaggcttttgcgtttactactcacagttctctgggagccaatgtttgcttccctttctccggggttttgtgcagggagaggtgcagagcaacaatcagagaccaaataacttaattcaaggccaaacagatgctttttttcttgaaggtatccaggggtatgatctgcaacagagctgctcatcaccgctctctaattttggggcctcgtgtaggggaagagctcattcgcttctcttgggatgtgagccagctgggatagatgcttcactaagagacatgtgtgcactttgtcctgatctgagctcactgtgaagggcctttgaactcatcaagcaattccaggaagtggaagatgatcaaagaacacaagagaatcatggtttaagcttcttttaaagtcgagtttggatgtgctgtgaagagggaggaggcagctttcttgtccaccggcatcacataaagagaagagctgtgaatccccacaaagaaccacttgcaccataagtaccagggcaggggaggcgtggggcttgtaacattagattattgggccctcctcacaccctcaaaatcagaatttggtggggcggggggctgcgggaggacggtgagagtaggtcccagcagtcagcaattcaaataagcccccaggtgactctaatgtactggaaagtttgaggacaactaagttaaagcatgggacttggagagttccaaccctgcttctactacttatcaactctgtgatctttggcaag

SEQ ID NO: 71119 - DNA, 1099 bp, Homo sapiens
tcgaatttgaattagggtggtcaaagaaagtttcacagagaaagggacaatgaggaaaacctgtaaaaggtttctggtgtcagccatgcaaaaatctggagaaagagattcttggcagaggtcacagccagaacaaagatcttgattcaggagtgcgtttggtgtgttctaggaaaagaagtctagtgtggctggagggaagtgagtgaggggaagagaggtagaagatgaggttagagagttcatggggttagtgacaccagattagcaagttgcttagggccttgtaggccattgtaaggattaggacttttaatttgagtgagacaaaaagacattggatgggtttaagcagaggagtggtgtgatctgaattaaaagggatcacactggctgttgtggggaggataaattatagagtagcaagcatggaaaaagggaggctatgtcaggggttggggaagtattatttgtttgagtgttcttgaactctcctgttctctcaccttgttgggttagggggaggggtggggtggtttgtgacctaggactttgtgccttttgaaaaagggaagtaactaacacgtgacagtgtgtgtaacatttgcagatgtggcttctctggatcaagagccaaacaaacctgccatagcaatttgaatttcttcctcttaagcctcttattccacttcagatccccctcctgacctattctttggggattcttagatacatttccatcccccatagtgacctaggtctcttatccagctttatttcctgcttttgacagaggaaaaagatagacttctgaattgatgtgagtggagatcttattatagtagccacctataaaatagcaggaggtagagatgtttaatgtgtaaaatggttgttgtcctggaaaaaaatcaataccataaatgtgaatttaatgggatccctcagggaatgggagtctgggcaatgtaacattttagttaattgaaaggtaacccacttctcacctttgtttttttccctcttttctttaaattagctcttgtttctgagtgtgacaatcaaagtgtttactgtgtgcatgtaatgtgccaggcac

SEQ ID NO: 71120 - DNA, 754 bp, Homo sapiens
atttcctctccccaataaactcctttctagtggtgctggaggctgcaacttggagcacacacatggaagtgaacaatatccctgctgagccaacactcctccccaaattggtgattcattttggctaatcacctcagttatgcacattagtttccttttcattaggtcacatgtaataactgccattttagatgggcgtgggattggggtggaataaagcactagaatgaaaaaattgctagcatcaatgaaaaaaaattctccaacaaaaccagcttgaggcacacttataaagtgaagggattcataggcagcctgattttcactggacattggaccaaagtactgtctggccccatgcctaggtgaagtcagcagctatctatgtactgcgaagtgagggaggttaaaaatccttgattactatcaagtctacccactcagatatgccacaatagttgaaaccttcactgaaatcattgcttcagggtaagaaacctaggcctgctattaaaatgtatatctcccactagggaccacttcattaagtcactattagccataaccatcttaacttgttagctcttgctctgtttcctttgctgtccttcctcctcagctctttccagatgagcccacagatatctaaaaatacagatttagtcatgcctcttgagcctgtcctgaatgagatcagaaagaatacacataattgttaacatttaatgagtgcttactatgttctgggtacaat

SEQ ID NO: 71121 - DNA, 474 bp, Homo sapiens
gggtttttttgtttgtccattaacttttattgttaggaaatatcctctttaattttatgtgatttcagtgattctattaataaagaactcagcctactctaacataagattgtatacacgatctaggatgactaatcagagaagtctacctcactgaatacaggggttgttgccaaaatttatgtgactcacactgagcagagtcttttggggtgagtgctgggtgagagaatgtctgacccttttctctggtatggtgctgcacagaagtatgtgagcctggaacagctggtgaccagctgtgctgccatgtggagagatcatgcctgataaagaaaacaaacaaacaaaaaagctgaagttaaagagacagagagaaacagagactttatctgatgatatttgaaatgcctaatgtaggcacatatcctgaacccaaatgactcatgtttccagtcatgcttccagttaatg

SEQ ID NO: 71122 - DNA, 6130 bp, Homo sapiens
ggaaaattgagataaatgagacatagttcctgccctcagattatttatatggaaacaaaataaaaaaaaaaaaagaaaacaaaaaaaaacgatgatatttagatagcccctaaggctaactgtctactgacctgggagcagctagcagggcctaatcactgggctggaattcagggagtattcacactgtggtgggagtggcagaagtgctgacaaaatctagattggggcaatcttagggaaatgaagacattgggcaggttaccaagataaggtcttaagcactgggaacaagacattaatcagagccaagatacaaagtaaagactggctctcagaataagacagctggccaattatgagaatggaagggaaaggtcggggctagcctggcaataaggggaattgagaatgagtacagaatattggtatggaactgctgaaagcctctggcagggatacatctgaaaatcaaaatgaactgccccctactgctgatggaagaagtgggtgagaggggatacccacagagaagaaaacagggacatagaggcttaccaattaacactgggtccatgtggatagctgactggctggtaacttacctctcagaggaatgtcagaataaatgagatagctacaaaatgccttttccttggaacacagtactttgtaaaatcagagatgcagcatcaactcaataaagagaattcaaacatcacacattcagatagtcatagcatttatagagttaatgcaggcttactgcatttagcaccctaagtgtccttgaaaactgtaaatttcttttttcaaaattaaatcattttaaatccactatggggacttgctatttaagtaaaccatgaggttaagtcttttgtaaagttgagaatctcttgttttctgtgaataatttccctcctgattatgtttgtatatttgtgtattagatccccttaaagtgataagctttcagcatgaggggtaatatttgactgagataccactcatgagaattcaacatgctccacactgccagactcaggatgtgacattcaaacagcagtgattcaatgttcttccactgactcacagcccaaacaagactgacacaacaagagcagacaaatttacagatgttcccaagcaaaatgcggtctttcaaatccagaacaagaatgtgtgatgacggcaagaccaaggccagtgagggtgaggactagaggagacctcaccacagaagcatcagcagcattcattcagaacatggggcaaagagaagtgacacagaggggacccagggctagtgttggcagtataaacagaaatcacccatgtaaagctcagttggtacctgaattcaaactaataaaatgagtgataaagtaggaacataaacagcagaagaggtcttggagaaagaagcttcataactaaaactgagaaaaatctggaaaattggattcatctgggatgaccaatgatctgtgtgatgggactaacaggtttcgctgaatgcaggactttcatcgtcaagacagggtacactgacatggttggtcgtgctaggtgcactaggtcctaggcagtagttagcaagccaggtagaggtaaagatgtggagagaatttaacatagtcactcctataatctacaaataccatttaatcaccattccttgtgtattagtttcttattgctgctataacaaaatatgacaaatttggtggcttaaaacaatacacatttattagcttataattctagaggccgaaagtcagaaataagtattactaggctgaaacccagtgtcaacagagctgctctcactctggaggttcaaagggagagtctgttttcttgccttttccagcctctagagctacattccttgcattccttgccttcttctagcttccaagctagcagtgtggcatttgcatgtctctctactttgtattaacattaccttctgtctctaactcctcctgtacctctaagatccttgcggttacactaggcccacccagataatccaggatcctctcaccactttaaagattcttaacttgatcacatttgcaaagcccttttttgtcatataaggtaacattcacaggctctggagattaggacactgacttatttagagggggccaaaaaaacagtttgggggctggaggtggcaagcatgccagagacatcagagagtagtgagagctagcatgactgctttacctctatccaatcctgcctgtgtgttctccaaagatgaccactctcaggtgtgagaaaaagaggagacagcaagaaaagaaggcaattgggaagaagaatggaaaaagaacacaggaggctctgatttagacacacttgccactctcagaacatgtgtatcatattttgactccaagtttttcttcaactgtctgctcccctaatatcatgtttgcacagtgttttccagtccattaagtactttaactacagtttaacaatcctcacaacagccttgccagctacttaatattacctaaatcttgcagatgggaaaatttagcacaaaagtcaagcaactggcccaaagtcactcagctccaaagtatagaaccagtactcaaaagaagaaagtgaaaataaagttcttagaaaatttggaatggagtaccctatactcctcacccaacaaatgctgacagaggagacacacgtgctagtgggtaagcacaaaggacacacagcaaacagcagaccaagagaaagggaagcaggaatacttgcctcatattctaacaagcccaataaaagggggttggaactctagcacttaatttgttcctctcagatgggaggctaataccacattatttagcctaagctgtagaaaactgtcttaggaaaattaaccgtggtcaccaaatgcttgctaacaaatcagttgccttgctttctgagaggtcaataaacagcatacatagctatttcaaaaagccaaagtactttctaatacagaaagaaggtaagagaggataaatgattcaaacgaggtaaacaaagtaaagagatgaggttcagccatgtgaagtaaatgacaacccagttgtattgaggctgagtcagcataagctggatatatatcccaggggactgggatctgttaacatcgaacagatcaattggttttcattttctatgatccaggaaagaattaattaatctagcaaacatttaatctaggttgaagccctactgtgttccaggctagtcagtaggttaagctcttatatgttagttcattaaatcctcccagccgttttgcaaggtaagtgttgctacactcacgttccctataatgacagactacatatacgttggtggtcacgtaagactataatggaactgaaaagttcctattatctagacaggttgtagccatcatattgtagtgcaatgtattaccttttctatgtttatatgtttccatacacaaatactcaccattgtgttacaattgcctgcagcattcagcacagtcacataatgtaccagtttgtagcctagaagcaataggctataccatatagcctaggtatgtaataggctataccacctaggtttgtgcaagtatactttatgatgttcacacaatgtcaaaattgcctaatgacacattattttagaaagtatgcccatcattaagcaatgaatgactatgtttctgtttggaagattaagaaacatttggagaaagattgagcaactcacccaaccacaaagttaataagtgacagagctaggaggcaaaccctggtcttctgcctcaaagtcctatgtccttgctagtacagaacaggtattttatagcaatgtctacttttgaatctattaagatacctcagtttccaccaatgttactgaaaaggatgaggtctgggtaaacatatattaaaatacagtcagtacaaaattcagtgggctgctttatgtatagaaattatctcctcatcatagaacaatccacaaagaaacaactctaataggtagacaactgcattaatagacatactgcagaaataatagactaggaaataatacctgcagaaaattgcagctcatagccttcacccatatatcaattaatgcttacaaatatacttaccagtatatggactgaaacacaagaccaaattattctgggaaattaagctataatgtcaccacttatagcagtccagtacctattttctgaatagcttcttcattcgtttctctccaaataagtaaaataactgtcctcattccagaggtgggtagagtaatgaggattaagaggagaggctaagattccccgtggattgacaagccattctgaataacttttagaatttgatgcaagttgaatagcaaggccaatatatcaagaacactcctttccacctgttcccattccctgtgtaaaaatcagctagactatattagctttcagaaaaataacccctaaaggagtttctgcctcctagacaaaggagaggaatttggaatgaaacactgagtatggggaaacagataatttcaagcaatttgaaagaaggaaaaaaacagtctaattcaagaaacagaaatggtcaaagtagttgtctcactaaactctccaactcacttttaaagaattagtctgaataagtcagaacaagttaagtcatggttaagcaatcaaatggaatctgggctaggtgcagtagctcatgcccataatcccagcactttgggaggctgaggtgggaggattgcttgagctcaggaattcgagaccagcctgggcaacatagcgagaccccatctctaaaataaataaataaaataaaataagaaatcaaatggaatcttatagtgaaatacagagtgatcccaatcatcagccaagaacagaatgtagtgcaggttctcttggggtttctcctcaggacacggtaggcactagatactcctttgatctttaatcagtcttcttctagcacttccttcccatggtgcccagtgcctagcagcctcactatgccctgggaggcagaattcaatgggattcaaattgccttatagaataccagaagttactcttccttactaattgtaactttgtaccccttgaccaacctttcttcatcccttctctcccctaccctccccagtgtctggtaaccactgttctattttctacgtctatgagatctgtgtgaaggatatgctaattcctcagatttgatcattacgcaatgtacacatgtattgaaacatcacattgtatcctataaatatgtacaattattatgtgtcaattacaaataaaaacaataaaagtaacataaaatagtgacataaagcctggctgatagggccagtccccttacccctaacacactttccgatggcaatgacctagtagtcagtatccagctaatatattacctcataaattcttctcctgcttcagcccaaaggagtgttgctattagagaaatgtcagacaatgagactgactttgttggattactaagatgcagttgaaatagtgaaagccaataactatctagttgagactcccccctgcattttaatgttagattactgactagaggggcttctaaaactttaccaaaaagcaaagaaagcacttttgctgaaaaaatgatgacacttttctaactctggcttcttttttggcccaggtttcaaagtactcttgaaatgtcagacactggagtgtcaggaaagagaccatccccaaaatcctaaggaggactggatttaagtggaatttgaaaagccaaaagtaaataaaacaaactaactaaattccctacaggctctctgtattaggcccattcttgcatttctataaagaaaaacctgagactaggtaacttaaagtaggtttaactggcttagggttccataggctttatggtgctggcatctgctcggcttctggggatgactcacgaagcttacaatcatggctgaagatgaaagaggaacaggcatgtcacatggtgaaagtagggacaagtcagggtggggatgggagttgccacatactttaaaatgaccagatcactggagaacccac

SEQ ID NO: 71123 - DNA, 1188 bp, Homo sapiens
ctcatgttggcccctttggtatgggtggccatgagactaaagagaatttcatcacctctcctggaatatttgtactactggccacccttttcttgggctaggtccagtaggtttcatgccccctatgcctagtccgacttctaaatcctagtttactgctgtctccccttgacagccttctactgagactcccacacatgctttatatccaaacccacataattatgacatattttggatggcttcattattcaggttataaagacttacaattacctgatggaaatttatcaacatcatttattcttgagtagctctttaaagtttataagatacattatttcatttatttcttacaacacaaaagtaaagtaagtaccatttttcccatttcagagacaaggaaactaaacctcggaaaagttaagggacttgcccaatgttacagagagccaattagttgtaaaagcagttcccaaactttgactcattcaaatgctattccagtccactgattacctaatactgcctctcttaacatagaaccatttgcataaattgtactatgaggacatgttcccaaattatttttggcagattccaggttctccaaacactttagaaaattgttctagcttgtctatgatgaagcattgtctggcttccctgtctatcatcaaattcactccattaattgttccaaaagaatcagtttagactatatgtggcaccagacaatggagcaaaagcctaaaatgtggttaatgtttataatatccaactaatattagctgtagattatctcataatacttcagttcttaatcattttgttcaatgtttataatacatgattttataccccaattagtttgaatccagactcttttgcttagtattcaaaattttcgttttgaatgaaatgagtacctttgctgtacttgaatgaaagagtacctttgctgtactcttcaaccaaactgattgccccatgtgaaaactgccctcaagtcaaaccagtctcgttaatatcttctttatacatcatgatcactaccacctcaacagctttgatcatgctattccctccagtggaaacactctttccctttcccccaccaacaaaatatcaacacctccttaaggcctaactccaatccctcctagtccctaaagctttccgccaaca

SEQ ID NO: 71124 - DNA, 2053 bp, Homo sapiens
ctcagcactagtttaaggggagggacacgcctcccaaagctgcggggatgggggtgggggttgctcactcgccctcggatctctgctgtaaaagcggagcggcagagaccgggcatgcgcagcatcttcgggcgcattgtgatgggaactgcttctctgagtctctacaaagactccggagtaaccactaatggccctcctaaggccccccttctttaagacagacacacaaacacagaggcaatgcagctatttttttttaaagggtgggaggacgttgcagcttgaaaggttgatccacgttaggagtggtgtatttctattgatcccatctccggtgttgacaaacgccagcgcctaggctttgcagtccggggctgcagtttgcagtagagctaagcggtgtgcggctttaattccacgtcagatcaactttgatcaatatccccctactggcccaattggaagagcccaattcaccggcactgagccttttcgctctttcctttttttccccccctctttagacctaccatcttttgcgggggggggggggcgcggagagagtctcagattgtcttgataatttattctttcgttctctttcttttgcttctctatttttgtttttcagtgttttgcttgttttgttctgttttaggattttattctctctctctctctctctctctctctctctctctctctctatcatagggacagaaatcgctttggcaaacccagcttgcagccaatgaacccgccttccagattggtgtgaagacagaagtgaggtggggggaagggagggggtgtgagagatcctgggagcgagagggagagagagggagcaagaaaggaagagagagcgagcgagagagagcgagcgaataagagagagagtaagagggagagagaagaagaggaagaagaggaggcggcggcagcggaggaggaggaggactagtgtggggtggaaaggaagagtgagcgagagcaagttaaggggagggggtgtaagagccagcgaattctttttctttttctattattattttgacgactcctgagttgcgcccatgctcttgtcagcttcgttttaggcgtacatggccaggcagaagaaaatggggcaaagcgtgctccgggcggtcttctttttagtcctggggcttttgggtcattctcacggaggattccccaacaccatcagcataggtaagcgcaagcgagccagccgtcggtccaggctctccctcacccgagaccactgccccggcaaggctttccctgcggtgggtccctgtcctgcgtggcctgggaactgggactggggccgggaccgggcagagatggtgcggggcggggggcggggcggggggaatctgagcctcaacgaggtggctggtctgaagagcctctgggacaagagaggggtctcctggggctagtgggggtgaactgctaggttttccgagccgagaggagcaccggaggcgagcaggaggctgggatgctgcaagggggtgaagagtcgaggcttttcggctcgctgctctggactttgccatggcgtgcgtgcagctcctggaagttgtcccagggtgatgccgactgtctggccgcgccagggcgcataacccgggcccggggtgctcagtccgtggtctccggctgtcgggagacaggctggtgctgggggaggtggagcccactttggatctcccagacccgggcagcagcaggcgttggtggtggatggggtaggaggcgggggtgagactaggagctgagcgggcaagcggcgaagtcacgcagaccacgaattcatgaattgccgctgtgtctgtctggagcccggctcctgggcgcctggagggagttatcttggcttctgtcgtatttacaagtctagaagttagaatttttgccattactgaaccaaccccctgtattgtcacgggggagggtggctatggggaacgggttggggtagcagggggaacaatattgtttttcttcccaacctttcccttcacacaatgaaaagatg

SEQ ID NO: 71125 - DNA, 792 bp, Homo sapiens
ggaattcacagggggaagtgcactagacaaatgaaccagaatataaggcttcatgagggcagggtgttttgtgttttgttaactgtcataccccttgcatctaaaacagcttggagcttagtaagtactaaataaatatttgttgaattaaataaatatgcttcttgacttgttttaggaaaaaagtcctgatgtttatcatttggagactaactctcagtcctatatgcattccactttgtggattttactcacggtacacacacagcaggagctctctagggagacttgtagaaatgactattcaccctatgatgacttaaacctttgcaaaaccctagcaaagctgtgttctctgctgctccctgccacggatgggtgtttcccagcgatgaaaaacaacagggagccagagctttttgtttgtttatttgttcattatgacctcaagctcttttcagcaaagggcacagaccttagatagcaatgcaattctgggaaatacaactccattatttgcttggctcatctaacaagatagaatgcagactctgatttaaaagcaagctcctttaatgagttttagttagggttgatggataaacagttgttattactgtcagtaggcacaggttgtaaatgtctgttttcaatgcttatattccattacagggaactcagatgggcatcagaatacaatttcctttaaaaggtggaattaaggggaaacaaaaaagcaatttcaaatgtggtcattttgtgtatccccagatggtcaaattcttggtcttc

SEQ ID NO: 71126 - DNA, 947 bp, Homo sapiens
ccaatatatgaaattcaaatttaggatacaagagtgcacattcattttcttaatgcttgtttcgtggaataattcactggggttatatccccttctgtgtttaagtacctcttattaactacctgactgggttagctttagaatctgctgacaaatgaagatcagaagcgaaagtgtgagtcaacaggaaaactatttgatttgtgcttgtgcacccaagacagctttccaggaacgtgtttattgtgtaaagtgaaccaaaagtaatcacgtaatgaagtagttttgcttacaggataatagctctttgacctctaaatgccttggataaaaaaaaagacaaggaggggagaataaatgctgtttctatgcttcactgtagcacctagaagaatgcttgctatcttacctcactttcaccctgtccaggccctctctccccatttaaaacaaagtgttctcccatcctttctcaaaagaggacatactgttaatatttaactaggctacatgaatcagaattttaatgaaacatcacttgctactttcattttagcatcggtctcacttaagccattgaacgtgttctccaaatatggtggataaatggaagtagcattcactgaactagggtttaaaagtgtcttaagaaagctttctgactaaatataaataagcaaattacttatttcgtacctcagtgacttcaatgcctcacagaggcagagagtgcatgttggacatctatttgttactttgacaaagatttaagactatatttagccagtaggcaaagtcagaattcccctggacatatcctgcagggagcaatgggatgtagcccttgaaatattcctaatgaccatcttttaatatactgattctaaaatgattagagaaggattacatgaaaggtctctctggctgatgtcttctattacacaaaa

SEQ ID NO: 71127 - DNA, 1675 bp, Homo sapiens
cggggggtgcgggggaggaagccacataggctggcactattacaagcgcgggatccggcaacgcgttcctcgtgtttcgttccaagtaacgaagttacaaagatttgaatctttagcatgagccacggtaaactggctactagaaatggagaggggtgggcaaggacgacaaaaatggctaacgagggttaatttcatccagggttgagctttagcatctaaaagcgacccagagaaggaaatgagatgttattaatatttgttcttatatctgaggtttgctttgctgcttaaacgactccttccaggggaaggggaggagggagcgctctaacgtgggggcgagaagactaggggtatggcaaattactgttttcggtgttacgggggaaagtttcacgactaaaggaaacgcgttatcctaggtactggagaagcttggagagctgccagaattagttgcagtcccaggataaaatggggtttagggaacatttaatgacgaaagttgaatccaacccgaaatagctctaaggtgaaaagacggagcaaagaaatgtcggtggttcttcagggaaagcggcaatccctgccacacttccccacggcgctacgcgaggccgggacagtcgagagaccgctccccgggagggcgagaggtgccaaaccgggttcttcgcggcgccccgggcttcgcggcagcgggcgaagaggaggggaggggaatccgggacggttcgccctccttggacttcaggcagaggaggcgccaagctccaaactgcggagtccaacgggtgcagagtgaagaaatggcacagagagagatggaaagtccgaattgccccggctcagccccataaagataaaggagccaagtgagatcaagcgaagagggggacacaaaaagagaccaagagggagcgcggagacctgcaggggcggaataagagttctactaagaggctaaaggaagccgagctaccgcaggcagtagcgatttctgggaggccagggaaggaaggaggtccgcggcggtaaacagcacctctccccgagttcgaaactcctagacgaccatccacgcccgccgcccgggtgggggagggggtacatctttccccctcaacctcccactacaggtgagagtgcagctgacgccctggcccggcccggcagtgcgcctgcctccggcccgaacactcacaattcgcctctccctgatttctcccagttctttatccactctgcgggaaccaccacagccgcggccgccatcttcctctcactagtagcagaagcccggatgtgtagcacgcgagcgaagggtcaaaggggagcaccgcccacgaggaatgccgggagctgagagttcgtttttcgatttcccgccccactttcctctccacccagcggaaacccgaggcaaggcagccaacgacgtggagactcgcgggcccctttgcgaggttactacacgggttgcgccctccgaagtcttcggccttacttcccattagaacagagaaatgccatccacaggccaacaagtagacttcatcttcttccgtaatatctacccctaaccactaatacaaacacgcatttttcaagcacctaatatgtgctagacactgggaatagagaaataatagtctttgggaaagccataaat

SEQ ID NO: 71128 - DNA, 1175 bp, Homo sapiens
ataacccactcctccacagagcagacccatcctacagcaattactgtttccacacgcaatactttactctggtcatgtctgtcacatcaatagcttcaacttgcgggccaaggagtactcctaaacattcattatgcctagacactaaaaaatctggatagcaaacaagtaacaaggacgatccctttctctgctatcattaactctttgcctttcttctttagtttctctaccagtcactgccgtcattacccatggtagtttcagaaactcagagtataaacttactctcctggttccggtgtgtactggtgtgatactgtgaaatatatatatttggtcttcctccccgtttcctggcatacaactactaaaatccttggactctccaaagttatgtgtttttgtatgctaatgattgactgatagcttcaggatatgactcacccaaaagacaaaggccaacctccagggagtggagagtggctgaaggtcaagttgagcaccagtggccaatggtttaatcaatcatgcctatgtaatgaaaactccataaaaacccaagaggacgggattcagggagtttctggatgactgaatacatggaagttcctggagtggggtgtgcccaaggagggcacagaagctctgcactccttcccgcatacctcgccctatgtatctcatctgcatcctttgtaataaagcagtatgtgtaaatgtttctctgagttctgtgagccactccagcaaattaatcaaacccaaagaggcagttgtgggaaccccaacttaaagccggttagtcagaagttctggaagcctggacttgtgactggtatctggtggggagcagtcttggggactgagccctcaacatatacaggatctgatgctatctcagggtagataaagttagaattgaattagaggacacccagttagtgtctgctgcagaactgattgcttgtttgttggtgaggagaaatcccctacatttggtcacagaagtcttccgcgttgattgtggctgtgttggtgtgagagcagaagaaaaacctgtttgagagttttttccaaagaatccaaacatggttagttttccctaacgagtgggaagaagagtgtcccccaaaactcatgtcaacccagaacctgtggacaggtctttgcaa

SEQ ID NO: 71129 - DNA, 2763 bp, Homo sapiens
taacccccgccattcccccagggtctccctttcttgtcatccctttcatccttcccttcttggaaacagatccgattctaacctcagttaccttattagccgcgtgatactgggatagttatcccctgtgggcctcagtttcctttgtaaaatgggcttattaaacccccaaagacagtgcttatcttacagggttgtcaacattacaacaaagaacacgttatatgcctaacacagtacctgatctatagtaagaactcaacattttcgccccttctcctcctcttttctgtccttgtgcctttcttccactattcctcaaccccagggcccaacaggtaaaaaccgtgggaaaaaccatccttaaggctgaaagaagaaacactggagctgggggcggagactacgaggtgctcactgcgcatgtgcgcgcgctaggtcagcttctcggttccagccgggcgggggggtcgggtgggggtgggggtaggggttgcaagggcctcattttttcttactgcccccatccggttcggggaggtggcgggaccttggcggcgcccggagccggcgtggcgctcatcgagggacgcccggcccaagtggtaagttgaaaaatggcggaggggggaagaaggaggggctttgcagggcaggaggctgacctcccggccgggggtgggagggacacgccggggcccagtggcgcagcccgggctgggagactgacggaccgcgcccggtgtctctttgaggccctgacgtggacacacttcgggtttcacgactccgggtttctccaggggatgggccggccggtagaggcgcgtgagggagacgaagggacttccgtttccttcacctaggctggggccaagccgcagagcggagttggcatttccagattggggctcgggccgcgcctcctccgggaccctccccttggaccgagccgatcgccgcggggcagttcgggccggctgtcctggcgcggtgggtacagcttgtgtaggctttcccctcccccgctttccctccttcccctctcctccctcccctcttcttttcccctccacttccctcgggccggcgctgctggggagggcgggaaggccgcgccagcccatcaggggtggcccggccccggctgcttgcccgggttcctcggactgccgacggcaggcgtgggtgggtgggtgacttcaggcctgcaggattgccttcctaaaccctgtgacacctaaggtaaattgaggcaaagaactttttaaaaaaatatgatcaaagggatttcctccccatgtgataacctgtggcttgtgtggagcagggtggagtgtgtctggagagggcatatgaaactgaaagaataagggccaaagagcttccggaagaggaaattagctggtgattctttccaatctgctttcccagtcacctttccggcatgttctgtaaaacaaaatgtaatttgactttgtttcattattttaactccataacacttaaattgttttcttttcggggaggggagtgtttattctcaaactaagcagtagccctctccaccttcgaaaaaggaacaacgtcaatccaacctttgttaaaaaactccaacctatcagattttaataatctagtagtttgctttcaaatataattatgtcgctagttctgtcacaactatactttgatagtttaatgactcacagaaatttgtaagactggaggttgcagtagtgtttctttcttattcttttttttccccataatatttattatagtcaatgaacagtgttacagacggccatcttagaattataacattttagagttggaagggatcttagtcaaaccctgtccttttacaaaaccagaaaccacggcttaggaagatttcatagcttgctaaaggctatccaactagttagattagaacccatgttatctggcttcttgcccaccactcttactgcgcaattgctccatatcgcctccaagcatgaaaattaaatgtattcaattcaacacacatttctgaagagtataatactttgtaccagtgactgtggtaccactttctatgtatttcaatgtatttaacatgcttatggagtacttgagattcccccccacccccacattcaagaagtggcaacagtttagatttatacacacaccttcacatgtacgtgtgtatacttgcatttgctcagatagtttcttgaaggatacacaataaaaatgttaatagtaatgacttatggaggagaagagagatagaagactttttactttgtacttcacatgatctaatgtacggtttgaatttgttataaattcgtattgatttcataattgaaaagttttaaagttcacaccttcccacacaaatatatatatcaacataagcaagtatataccaatggtatgtacacatttatgtgcatatatgtatttatacatatcagtggtttgtactgtaaaatccggtatgattcaggtcaactcagctgacaaagcagacctcattattggatactcatgtttcgttttcttgtattgctctctcctaatgtaagatagtaaaaataatatgttactagtcgtcatatatttttagaaattgtcctaagcttcttgattatcaaataatgtagcaaacttttaacacatttaaaatatcaaatctgggtacttgcttcagtggtagcacatatactaaaattcgaacaattcaaagaagattagcatggtgttttt

SEQ ID NO: 71130 - DNA, 641 bp, Homo sapiens
ctgacctaatttttgtatttttagtggagacggggtttcaccatgttggccaggctagtcttgagcaatcctcctgcctcagcctcctaaagtgctgggattacaggcatgagtcacggtgtccagcctgcaagtaatttagtttgctttgaatgcatggcataatgaacagggagtagctgtttgttcattcattccttcaatcattcaacaaatattttttgagcacctatcctatttcaggctctatactaagggctaaggatgcaacaatgaacgttacctcagcagagttcactgttatgagatttggatacgactgtggaatgcactgaaaactaccctaaagagtttgtacttggttcttcagatcctcactgcgcaaactgtggactttagaccagcaacctgggagtgtaccggaagtttgttagaaatgcaaaatctcagccaggcaagcgtggtggctcgcgccagtaatcccagcactttgggagggcaaggcaggtggattgcttgagcccaggagtttgagactagcctgggcaacatggcggaaatcctgtctcttaaaaaaatgcaaaaaaatattagctgagtatggtggcaggcgcctgtagtcccaactacttgggaggctg

SEQ ID NO: 71131 - DNA, 511 bp, Homo sapiens
cctgggcgacaaagtgagactccgtttcaaaaaaaaaaacaaaaacaacaacaaaaaaagatagagctttggttccattaactcatactgggaacattgcatatcattcaaagtaaaaaaaaatcagcaaatctagtaacagggtatttaagatgtcttaaaaggtgccagttatttgttttagacaaggcttattggtatgtctatttcctgttaacgccacaggtccaaggtctatttctaagtattgcagcatcaagcccttaatcatgtaagttcacacaggggtaatgataaggatcttggaaattaagtcattatatccaagtttacaaaaagctgatttgtaaaccagaaattcaatttattaatttgcaatagagtaattatctttccactaaccagagaattttttcagttattaccactgtcatttttttttcttttcttttttttttttttttttgagatagggtctcactctgtcttccaggccggagtgcagtactgc

SEQ ID NO: 71132 - DNA, 4288 bp, Homo sapiens
tttaaggactgaaaataatcgttatattacattaggaatgtttcagaagtgatatcggggtgaaagcttcatgatttacacggggctcaccctatttctcagttggaaaatttgttttgttattaatacgttttatttcttttcttctaattgaaatgtaatttaatatttaagaaatattttaaccaaaatttcaaaaatggaacagaaacgaagacttcttaagcaaacactattttatgaatctacgaacttctataacagcaatggagacactgcaataggtcacttcttcctgtccaaggaaaaagcggcgctttggaggggataggccctcctcgagtttttctcccccgagtaaagagctcttggcggtcaaaggtccaatacactggattcgaaacaaacaaaaaaaaagggtgacaaagattttagttaacaggggtcggaggagcagaaagggtcttttcgcacttcaaacatcttgggggagggatgggaaggcaggatgcgaagtaacctaaattcccaaccatttcgcgtggttgcacccgcccaggaaggcagtggatgcgcgggggaggcggggtaggtccccctccactccttttgcccaaatttcgatttccctccacttcgctcggtcctatctcttcccccgccccgagagtggcgaacaaattggtcgagcgcccggcctagcctagtagtccagttctttaggactcctagaacctggagatacagaccacgttttctcggagacgggaccagtgggctgtaaagcaaaacaatttttctttcttttccagggctaggtcttactggtagagaatcagctcgctctctctccacacccgaagcaaaaagcaaaacaaaaccaacccgtattccgcccccgatctagcccaagtagctccattaaaccatttaggatcaggtgccagagttaagcgacttgggttcttttggtgggaaggggtagggacaagggggcatcgaaggtacgggaactagggccacaggcccctcacaggggtgtgtcagaagaggggacttcgaagggtgatgcccgactgggctgccaccttagcgcctcgcgaggggcggaggggcccggggaacgagtcccggagcgaacccagccagcctctggattcccacggcccagggctccgccggacattcctaccgccctcccctcgacaccccactaaagacagaagaaccgcggctcgatcgggtccgcggcggaagcgcggccaaacgaatgagtaagtcaggcgcgggcacggcaccttgtttaccccactcggcggcgcgcccctgcgggcgcctggtttgcgggcggcgtcggagacgctgaacccgggagtcagtcggccacgattggtcggtgactgggaggaggacgctgggtgggagggctgggagccaggcgttgcagtggcaactctctgccgctagatgccgctccctcccaacgggagccgggcgcgggttcgtggccgacagatggcgcctgcgcgttccattcgcctccaagtcgccgaagagcgaacaccccaaacaatcccgaagcgccaccaaaaaaaaaaaaaaaaaaaaaaaaaaaaaaaaaaaaaaaaagaaaaaaaaccccgccggatccgaccgccactttcaaaaccccccaccgctctagaaccgcgggagcttccgtccctgagtagaattcgagggtgtaaagaagaggaaggggaaaaatatcttgtaccagcccaggggtgaagaagcccccggcctgagaaagaaggaggagtgggggaggcgaacagtctcgttgctgcctctgtgtacgctgaggggggaggtaagttataaaatggcggaggcgaagcttctagaagtttggaggggcacccggagggcgcttggcccaccgtgaggtgtgtatgattgaaacagggcgagagagaggagttgggagggaaagaggttgggcactctgttgccattgaatttcccctctgctttcttcgcccccatggggggcagccatggaacggggggcagagtccaggcgggaggatctttctcgcccccgcggcgccccccgccctcctttctcccttctccccccaagtcgctaccccaacacttccaaggaacttccagccccccttcctccctacctcctactcctagagtggctttctaccgcagggctcttcttttcgactaccctcgctgaagattttctcttccttccctcgcccaactctccctcggggcctctacggagaccccccccccccatgggtggcccaaaatggagaacgcggagcagcgcaagatggaggctccgcttctctgtgtagcagtagatttaggttccttttctccggcaggctcctaagcctaggagagcccgaactggaggtggggtggggtgcgagccgtagtcgggggaggaaagccgggaggctgtggttggggtgggggagagcgcggtgtcgcggtgaggggaaggcagagagcaaaatggtggtgctgggaacctaggggggaggggagaaaggaggctcagttgtgtatatttgggcctcggaccgagggaggcgagggaaaatctactctgatcacacccctccctcgtgccccctcccttctcccttcccctcctcccttccctccctcccccctccctccctctcttcctcccttcctagagagggaacaacattcatgtgacgggcccctctgcttctcccccgccccatcatctccagcgcgtggtgggggaactgctggggaaggcgattggcatcgatctctccatcccttccgaggcccgacttcggtcagttttcttcgggcaacaattttctaaattggctggggtctggcggtgttggcccccgcgcgcagaccttgccccgaagggggccctgcctgcctggcatgggcggaggggggaagggcgggagtggaaggctgtttgttggggggttttggcgccacttttgttttagttttagtgctgcttttcattcccacccccacccgcactgtctttctcaaggcacgaactgagctgatccttgccccaggtaggcagcctgtgcgttttcactccacacttttattcttgctcggggtcgactttcttttttcttctcccctggatccggagatctgcggacggcgattttgggacgaaaagggtcggatgggccgtgggagagagaaggtgtgggaaacagcatcaagtagttccgcaaaactttgagccccgttcccattttcttttggcctagaattgtgaacgtattgttgatttcggcctttttttccccccgtcgcgagaatgtcttgttttgcctttagttttttataaaccgctgtactttcgacatttagtttccgctcccccttggtgcatatgtcattttatttttaatccttaactgtaatgggttatcgtgtgattttcgtgcttcagtgctcggctttaatttttaatattgtattagtagtttcatccggtttgtgagactttctcttccgtggcctagaatgttttttatgttgttgcctaccacccctcttccctctccctccttctttctcttggatgtagtttttaaattgagggccatggtgttggattaaatggtaatttacagtttacatgatatatctattggaaacttttgatctgtaaggttagatttaaagtaaacgaggcgcttgtgttggtttgcaatggttccttaaaatgcgcgggccacccccttctcccaccataaagccccatcttcccttcacactggagtgtaaattccataccccttttctcccacggaccgccgtatttcgcagcagccacaccctgtatttgtctctgtggattggactcattatcagcttaatttagtgactcttaaaccaccatgatgggacttgcttaagcacgaagcttcttttcctgtttagtcctagtggttagtgtcgaaagaggaatcatcgaggtttcttgatgaaacctagtgcggtccaacctctgcctttttttctgttgtcttttttcctactccgggctgttggcggtgtcagcaccgctgctgggggcgggggtggaggggagaaagagtcgggttaccgaagtgcgtcattcctggctctagcagggcctgctcgggagctgctggtgtttgttactgtcctcgcagcacttttctgccaaccttctctctctgcgtattggttaggagcaaaagcaggaggcggtctcctaattctgtct

SEQ ID NO: 71133 - DNA, 649 bp, Homo sapiens
ccaagggtagatttatgatttccatcaggctgaaacttttttgcaggtaggtatcatatcatatccatctttgtatctatccatagtgcctgggacataataggtactcagcaaatgttaaactgagtgctctgaattatttcatttgatgtgaaaatcttggcagagacaacattgttcattaatgtcctgtaaggctgagtttgagtagtgaagtaatatgcctatgctcgcacaactatgagttaatataacccacagatttctgtatcaaagctaacagtttcgatttcttttcaaggtatgtttacttggaaaagttcatgacctttcagatgtcactccgaagagaggatgtgtggcttccactgatgtcttaccgaaattctttgctagctggtggtgatgatgacaccatgtcagtcattagtggaatcagcagccgggggtcaacagtacggagtaaaaaatcaaaaccatctacaggaaaacggaaagtggttgagggcatgcagctttcactcagtaaggatataatttattctctttatatttatccctaatgtttaccaactgaattgtcattaaggttcaccttattttttatttgagatgtgttcaataatagcttacaaaatgtgttcattat

SEQ ID NO: 71134 - DNA, 875 bp, Homo sapiens
aattaggttcaattggaatacttaatcttttcctacttaccttcatcaagtaagagaatccagtagattccagggacacctccaaccctggaaccaccataacaggtgctgtaaataaactatgaagggccccaacaaactctagaattgatttggtagccataccagacaaggcatctctctgggaaaaactgcttcaataggggtttgagtaaaattctttacatatatagttaaatttttgccttcagaataaaatttttccaatgtgctcagatctttctagaaaaaagaaggggtcaaaacccttctttgaaacaactacaatattttgatagccagtttgtggagtttcaattcagtcagattagtcatgctttgtttaggaagagtccataggccatttttccaagagaaatgctattttgctatttgcacaaaagcactttggaatgcagtacattcattcattattgaatacccccagtgtgcctgtgaggaaagttagaattagcaatctcctcaaatctcagctggggaaacccagacacatagggagcttgtccggggtcactaacaagtttgggcctggaccaagattagactagattatatgtgattttgtgtgcaaaataccatcagaatactcttgctctgaaggcagcaaaacaaatcagcgttcctgctttctaatgagcaacatgtcctattttgctcagccaggctgttctcaaactttgtgtactggcccttagaaaatagaatagcccaacataccaaagtgaaatctaatcaatgttattttcttgatagccagcagtcaggaaggtccctcctatcaatatgtaacttgccatttcatgtcatttctcaag

SEQ ID NO: 71135 - DNA, 1210 bp, Homo sapiens
ctgattttgtatgcacccagattaaaaatggcatctggctctcattcttgggtctgggaaaatatctgcagcttttcctggtatctttctctcacagcatctccaagcctctttctaagttagctctagggcttgggcaaaacaaagtgctttcccttggcctaggttgttcagatccactgtggaaaagtgagtcacagagggaagctctctgcccccttgtgtacttgggcttcactcacttttatcagctggatgacatcataggggctgtttgccagcattcacctccctgggatctggagtgtccttcacaattcccagaataatgcttttttaacttaaaaaaaatcttctcatgtcagaggagagtggaccccaggctgggagagaaatgtcttagtcaccttgggttgcaatagccaaatgccatagagtgggtggctgaaacagcagaaatttatttctgacaattctgaaggctaaagtccaagatcaaggtgcaacatggtcaggttctggtgaggtccctcttccagattgtggatggctgacttctcactgggtcctccaggatttttttaaatagatagattttagctgctcttgtcacaaaaagtaacatgagatgatagatattttaatttctttcacgatagtaaccattctactatctatgtgcatcccataatatcatgttataaacctcaaatatatacaataaaattattacgtagtccacaaaactaatgactatgaacaaagtcaatcttttctcatgtacttggaaaactcctaaatttctctgtttgatactcaaaagtaaacatttgaatctctgttttcattcatatctccattcagtgaggacttctatagaatcactggtttgaaaggcctagaatgtcaggatagttaattctttttgaggcttcaaaggtcagttctcacacgttataacctcctggccacttgcaatctatcaataaacacagacaaatgtccttgctcttttgaaggacaaaagtgttgtactcctttgtggtttggtttctaacttttaagagcaccaagagcagtccaaattcaaaggaaagaagcagcttcctcccactctgttgtcaattatcttcttgggaagtttctttgcagagtttttgtgcatctctgagccaattaccacaagaaaacaaaatgacctttaaattaa

SEQ ID NO: 71136 - DNA, 1663 bp, Homo sapiens
agtcatgacatacacaaacatcgcgtgcacacacacgcgcgcgcacacgagcgcacacacaggagcacaatcactgcttctatgttcaaagcctcaggactgacttagaatgcgaagtcttttgccagtataactttggcaaaaaaaaaaaaaaaagggcggggggagagaaattgtttggtttccttttcttattctcctctcccccgccttccagaaaagccaaaagcccgtgaatgcggtgcataagcgacccacaagctctcgtgcgtctgtcggtgagagtgcaccgccgactgcgtcctgctgacagtgtgaccccagagcgccaaggccggccggccacatgcagcctactggcggcgcatcagatcagcagtaacgacgtccacctgaaggtggttgggggaagaggggagcgctaagggatcctgccctgcctggccgcccaggttcctgggctccctaaacggctccgcccctcacccagcctggcaccagggcacgtactcgggcgaacccagcgcgctgccccaagccctggatccctccctccctcccaaccctcctcagcttcctcgaaaaagcggagaagcggaatctgcacgcccagaaactcgcgtcagaagccttagtagtccgactgggcatgctcgggacttggggcgcttcgcatggaggcactctccagcggctaacatctgtccgactgggccagatgtgagtctgaagtaggaggcttggatgcacgctagagcaggctctggttccgggaggggtggcggcgacgcccacagcagtcttctttccggcttcccacagagagcaagaccgtgggagataccaagtgccgagccaggggagctgcacaaactggagaaataggagtctagcggattcccaggcctcctgccccgcggtgccaccccagccgtaggcaggtagggggcgcgcagagcagctagggagcaccgcgtgtgctcccaagggactgctgacctctaggtaaagaaaagagagcgtgaagagtcgaacattctttgggcgaaggacgtttactgatttttttttttttaagtaaagaaagaagggcgtgtgtgaatgcgtatatgtgcacgcacgttttaaattttcctccgcaagaacagggacaggagagcgagaagctattgccgagttgggaacccgctagaggttacaataaggcaggcttggagtcgtggctggtgctagttaccgggaagagttcctcttggcgcggtgggcgaacaccaaagcttccaactgttcccttccctgggtggcggcagctgcccaaggtcggcttccgggctggtctctgtgctcctgagcagggggaccagattcagtttcagaaagagaggtagtacagagtgacgccagggggagttctctgaaccgtgtgttcccattttcccagcttttgatataggtatttgcaaagagggagcattgtaagaccatcacaccaccaaggggaggaaatacaaagagctgaacactctagggggaagaatcagggaatcaagagcacgtttattcccatcgtcccttcccaacaaggtcttcagcttcaggcaggaatcatttggatccctgcggctcaacaccctcccactcccgtcccgccccaccgccctgc

SEQ ID NO: 71137 - DNA, 1775 bp, Homo sapiens
tgagtgggaggaatgagccccacatgccagagcaaaactcaggcaaaggcaccactggccacagaggtttccagctggaaaagcaacaccccaaggatcccataacagtgtgagccttggcagtggtcatgtggtgctgactctgcagacacagaatacatgagctatgaggccatggtgaccttcacctagatttcaaaagatgtattgggcagcatgcgggttcaggaagaaacttgtcacaggggcagagccactatagagagcccccactaaggcagtgcctagtagagctctgaaaatgaggccactacagagagtccctattagagtaatgcctagtagagctgttggagtaagtccgccatcaataccccagagctatagagttaccggagtgcaataccagcctgagagctgcaggcatgtaactccaacccaagggatctgaagcatggactgagcccagtaaagctgttggggcagggctgccagaagccttgggggcccgatctccaccccagtgtgcccagggtgctgaacatggagtaaaatgaagttattctcctgctttaagacctaacgttgttttctctattgagttttggacttacctgggactggttacccttttcttcctgcttatttctcccttttggaatgggaatgtctagcctatgacagtcccaccattgtgtattagaagcagatgatttgttttgatttcatagggtcacagctggagagaaatgtgcctcagtgtgaatcataccttgtgttcatgcatatttgatttagatgagactctggactttggacttttgagttgatgctggaatgagtaaaggctctggggctattggggtggagctaatgcgttttcatatgagaaagatatgcactttaggggccagaggtaaaatgctatggtctgactgtgtctcccaatgttgatgtgttggaaactcaatccccagtgcagtagttttaggaggtaggacattcaagaggtaattaggtcatgagggagtgggtttgttattgtgagtgggcagttatgaaaatgaggttggccctctcttactctttcactcttaccctcccaccttctgccatgagatgatgaaggatgaaggccttcaccagatgtcagtgtcatactcttggacttcctagtctccggaaccatgagccaaataaacttctttccattatctttttttaaagacagcctcactgttgcccaggctggagtgcagtggcatgatcatagctcactgcagctttgaattcctgggctcaaacaatccttccatctcatcctcctgagtaactgagactatgggcacacaccaccgtgcctggataatttattttatttgttatttttttgtagagatggggtcttgctttgcttctcaggctggtctctcaaactcctggttttaagtgatccccttgccttggccttctaaagtgctggaatttacaggcatgagtcaccatgcctggtataaacttataatgtttataaattactcaggatgtggaattatgttatagcagtacaaaacggagcaagacaaaaccaaaatgagggtcgatgcctgtcatatttctcaaagtctatgccatgctcctcaaagcattcatacaataattaaatgctggtaacatttgtctctgtagacaaatatttttggtttctattattagacaataagaactataaaatcccataatgttttcaatttatgtttgagtccaagaagatg

SEQ ID NO: 71138 - DNA, 386 bp, Homo sapiens
gacaaagtcataaatccatacatggaggttatatataggtgagttcacagatttcttaattcacaattggttaaaggaacaaagctttgtctaaaaacttgaagtcagcagacaggaatgtttgagtaaagataaggaaatctattagtcatcctatgatattatgccagagtcaagttgtgaaagcaaaacagtaaaatgagtcagagtggcctctaggggatacctgactacacacgtgcctggtatgaccctaggtcctgtttataatttggtatcctgtttccacgaagaacctgttctgttctatcagtcttatgatctttattttaacattaatgctgagcagttgttgtgtctgaactgcaaaaggtagggggtataat

SEQ ID NO: 71139 - DNA, 467 bp, Homo sapiens
gaaacaaaatattatcgagattttatatgaagtaactccattaactgccctgaaagaatagcaaatgcatttttttttttacatctaataaaccttcatgctgctggttgaaaggctgcgtaaaactttgcctccctgggacacagccaaaatctaaggcaaacagacctttttcctcttagatctaatgttacaaatctatgtggcaagaaaggcaaagcaaataaatggcctttacaagccatgcaatttaacagcagtgaacaaatcagccatttggtacttgtgcaaacattccgtgccatcttctcaggtcacatgaaggaattgggtctagcatatctaacaacaacaaaaaaataaagcagaaacatcttttcttcccccaccctctgcacagggactttcaaattcacagatactaattctgaattagcaaactctagctagccactgccgctttagtc

SEQ ID NO: 71140 - DNA, 1315 bp, Homo sapiens
tttcctaagccagcgtccacggttcctcagtttgggggggcgggggggtacgacgcagagagctcctttcctcggggtgacacccccacctcggcaggcggggttcaaacgaacaagggatggtttttttcctgccatccaaaagaccgacattgccaatgaaagaaagaaatgtcttccctgtcaccctccacccagcaaccaccagcaccttgaaattcaaattacaaaaaaagccccagcaaaacccctttagcgcgagtgtgggattgaagggcccagatttcccaggcagaggccgacgggaaggcggggggagagggagcgagcgagaggagagggagaggcggaggctttttcctgcacagccccatcccccaccccgttacccgagttccgggaaggtggagggggtcgggggctgtcgaggggctcccgagcccccaggccccgggagagcgggcacccctccaccccgcgccgctcccgcccgcgcccagccccgcccccgtcctccaggcggcgagaaggaaagggggaggggagcgaacgccaggcggttccgccgccgacccccgcacccgccgcccctagccccgcaaagctccgcgggtacctgtcggcgccgaaaggtcagggtttgggcccctcagaggggccaggcacaggatttgtccaccacacacacacccccttcctatttacctccttcttcttctcgcccttctccgtggccgcggtggcttcggtggccgcggcggccgctccctcctcctgagaggtggacggcccgggctgctcgtcctctatgaccacgatagtggcggtcgcatccgcggctgccacggtggctgccactgcggcagtgtcctgctccatgccgtgggagcgggaacgagtagggggacaaggcaggggacgagggctcctgggcggcggcagtggctgcactggaaagagctagatggagcaggggtggggaatcactccgcttccaaccccttcgctcaggcccccccttctttaaataaccctcaaccctgccccacttccgtccacccaccctacgtcatggcctccccccgtcactctccccccttcctccaccccccccccctcaacgatcgcgagactccccttccccacccagagcccgggccggccccgcacgaccaactgttgcctgagtgtggggcgcggacaggggtggaggcgggaacccacaactcgcggccccctgaaaatctcctttcccacacgcccccaacagtgagcctgagctcccctcgcagatgcgtgcagaacgaatcctctt

SEQ ID NO: 71141 - DNA, 580 bp, Homo sapiens
tttctcattgtcagtgtacattatttcagttacatcgtgggttaaatgcacttttgtgaggaaatctgggaaacacatccctttataacaccttttttttgtggggacatgtgttccatgttccaaaaaaagaatttaaaaatttatttgggggcagaacatatttgtacgttggcaattttccatgcatgtataatgcaatccttccttttcaagatgacgcggctgaaagtgctaccaagtatatgaatttggctggaaaggtcgatgcttggtcaacagaccttgccacaggattcatgtaaatattgccctttggcttgtggcaacagctgctatttacagagcatgtgctatccttatttgtaaatctgcctaaaattcatgatctgtagactttgttcaacaagagtcatctcatttctgagcctactcaacaccttgctctatctgctactactttccccaattatgtcttttcatttgaaatggtcttggattgctctattccattggggttggagaacagagcaaacttttataaagaactggctctcacgcctgtaatcccagcactttg

SEQ ID NO: 71142 - DNA, 1371 bp, Homo sapiens
gacacaacaggtttgagatctcccataggtatgactgtgttttgtttctgtggccttcaaagtcctcagaacaattttgatgtcacaggtggcatttaaaacccattccttgctggacctggtagagacgcccccagtccgtcaggtctctcgctgcagttccgcagtttgaccgcaggggacggaatctgcggcggcctggaaaactggcgggggcgcgaggcgccgctctctcttgggtcagattctcagctcccagctccccgctcccggctcccggcgcccggcgcccggcgcggagctgttcctcaaacgacacgcagccgaggtgggtgggtgtggggacgcgggagccagtgtcgtcggatcggcccgcagtccgctgtcctgctgagcccggaggccgcctggatggagccgccgctcccggtcggagcccagccgcttgccgtatccgccggagagaagggagaggggaggccgcgcagggccgggggtgggggtcgggggccctgcggaacacggtggggcggggcaaccgggtggcccagaggccgagcagagagggggagggggccggcgcgggagacgaagcagggcggggcggggcgggggagggcggcggtggggggggggtggaagacccccttcgccccgcagtgcaccactcctccccaccgcgcttccgaaggagacccttgactagcgcccgcatactgtcgagggtatggagatgaagggtcctctccgggagccctgcgccctgaccctagcccagaggaacgggcaatatgagtaagtaaccacctgattcccacagaggaggggagcctgccattacctcccaaccccaaaccgcgacgggtcacccactgtcctcctactgaagccacgcgggcaacaggttcaggtccaggtgtgaagtgccagtgctctctaacctcggggctttgtccccaacttccaagcctctggattgtgcttggcagtgtggctcagtggaaggactgaatgggcggggaagcaggaagcctgggttcttagttcctgcccctgcaactgacatgtgttgtgtaacgttgggcaagtcaataaagctttctgggccaaagttaactcttcagtttaataaaaccattaactgccttaccttacagcctttggaattataactgggggaaaaataaatgcgagagtggcttccaaaaagtaaaagtgctatggaaatgcttcattgttaacgttacagacttgtcttaaccctattcagctggtttctccagtctccccgtccccttatcccactgggttgaaggcatattcattaattcagtaatggtttagtgtaggccagaaactgcctcacttact

SEQ ID NO: 71143 - DNA, 990 bp, Homo sapiens
tgccattctgctcaggtgtaaatattgcccggagtcacctcgggtatttaggattttgactgtcttcctttaaagcatctgacccaggtgcaggctgaggatagggtgacagcctcctgggctggatccctcttggctggtgcttcccatgaggtgatccatcagccgtggcacttgcttaaggcactgcccagctgacaaacggctttgaagtgtgccttttggctttgcattcttccacttcctggccttcttggctttcactgttagcaggcaggcggaggggttggcggggctgggtgggggggcgggggaggtggtatcacctccttcctcttgctcctctagcacgtccatctaaaaaacatcccaggaggcttgacattccaggtctttagtttcttacatttgatttccctagaccccatcaagtcataatctccttcctgcagggaagggatacttccacctcttcctccatatcctcttagctccttgcatttgggtcaagagacctaaaaaggccatttcttatttccatcttgtcttccattgttttatcccctgggatatctctgcattcatggccctgagatgcctcactggtctggaatgctcagggcaagccgatcctctgaatcatagacaaagaaactggaaagaggagtgctcattaggctgtcatttccccagtttcctccactgacctggatgtctttccactggtttggtggtgtgcttccccactctgtcccactggattttgaggttcagtctacacagccccagagaggtgaataacaaaagcatgtctacgcataatccaagcaaaatcctcagttttgtctcaatgatttgggcatcccagtacaaaggactacttcagtagcaggctttgggataattttctctaatagttaccacagaattgaagctggaaaggaccttgaagtttatctgttcaaagacaccctccttttttgtttatag

SEQ ID NO: 71144 - DNA, 680 bp, Homo sapiens
agatgagagaaaatatccaacccctttcaagagagaaaaaatcatgatatgatttgcttgcctggtggcagagactgatccataatgaatcattcagacctttacttctgaccctcttgtgatgaagaatttagatttgtgagatggctggggtcaggtgggccaggagtggacagaggaagtaaataactaagttcagagtcattctgtagcacagattacagttcaggttttgctggaccaatcaggaaggttagaaaaatataacatcaataaccttgaccccgttgacactatctaaatccatcacaaaagaacagtatgttgtaagattcctgtaagtcgtaactaaagtcctgaccaggaccagcctactgattatgaatcagtgtcttggccaccaaccagtcctatctccctgggaattctgaatgagccaatgaacttggattcctagtaacattgatcaagccaagagatccctttccgcatgcaagtccacataatttctcacttagaaaggagccaatacagcaggagggagatttcaaaatagcagccatgacgaaacaagtgaaaattgtgtccatttttctttatctgttctgatgtaacttccagaatcattctttctgcatcttgacaccatttttaaagaaatttgttatccaagactgtta

SEQ ID NO: 71145 - DNA, 1146 bp, Homo sapiens
caaggctgtgcccacagcaagttcctaggttctgcctgccggcccattatcaagtttaaggtgaccttgttccctgaactactgactcgtatcacttccttagctgagagctctgcgtacctcaaacaacataacctgtaaaatgcaaatatgttacccagaagggaaaatctattaaacacatgtttaagggtcattagccagcaaggacctggcctattgggattcagccagggcaatctgttggaagagaaaagctgggggaaggcaagtcccgatggggggtcctggacaccccgcctccactggccccggtccccaggtggcggggaggaggtgttcctgaacagaggagacagatctgaaaaggagaacgaaggaagccgttgaaaacacttgctcccttctgtcctgggagctggtcacctctccatatttctctccaaggcaccctcacctccctctcgctgccttttcccaagcctcgccagccctgtgccctggtttgctggccgcctttgaaggttctgcggttagtgtgtgatcttctgtcgctgccggcgctgagcaaacaggaagcgggcacatcctgcgaggcggccagggacgcagccgctgcgcaggcccggaagattctgcgacctgcttcctccctcacggctctggctccaggtgccccaggccactacagcggcgtccccaatcccagaaccctctggggctgccctcctgctcctggtcacgcagagccccaaaggcccgatgggtcccctacacggctgccaggctactgtatatgccgaaaagccttaaccagttaccgcgcttgctagtgaccctgggccgcctgggagggactttcagggtggaaaacacaggccagtgggaaggagatctggggtgtggaatcttttcatgagtctgcctggccgactgagtaggccaaagaatgtatggtttcagcttagggaagaaagatcttatcttccctgagctcaccctgaaggttggatggtcagagggcataaagcagaatcggagaggaagtcacgagaacatcttgggaacaggggtggacaagcctagtatttcacaagtaccacagaattgaaagccttaaaaatgtgcatacctttgaccccagca

SEQ ID NO: 71146 - DNA, 1644 bp, Homo sapiens
aaaggactctaaaaataatagtagagtttctgtccttataaaacctccctcccttcctccacttcaccttctttcttcaattagccactcgaatatgaatcacagcagggaacaagtcaccctctggcagggccaggaggttctggacgctctgtgcacatacgtgcattgtatttacacaaaacagatttcccctcatcaaaccctctgcaacttcctgagtccgggaaatgaaacaatctggctggtctagcctaacatttgtgagaatcttaatgaaaccacatcagagacctgtaggtgaaaggctgacttaagcaggagagattctggaatggttggtgactgctgatggctggttggggggtggggaatggcagcagctaagaaaagtcacaagggcgctttctgggacatgtcctaagtaccatctctactcagcatcctgaattcccaggcccagagtttctcagcctctgctacccttctcctccgctcaggtgtggtgttgtggcctctatttaccgacaccacatgccccacgctggcaggactgaggcggaagcctgcagcccgacggacggagggagaaacagccaactcgcgggctggagagggcaaaggtccaaaaacagcctaggagcggagcagggaaacgagaaggtagaaggttcggggaaggggaggggggcccagaggtgcagagaacccgtcctttgtgtaaaactaacctggaagacaatctcctcccgataaaccggcccagcgggagaagggagaccaggaagggggagccggcctggaagaacaaagatcaaaatccgtcgggaagcagcgaccggctccccagcggggggccggaggccggaggccggagtccggggccgagccgcgggcgcggcctctcgaggcccgccctgactccgccacgccgcggaccaccgccccaggcaggttgggacgcgcgccacatccacacgcacacgcagccacacgctcgtacacactcacacacgccccgccacgtgtagtcaccccgggccaggggctcggcggctgccgagttgagaagggcggtgccgacgtccccgcctccaggcgccgcggaaggggaggcagcccaccctgcagccgagcccaggagacccccgcccccacccctcgttacctgaaccacggagacccaactcggccggcagctgacggcaggaaacggaccgtcccagggaatcacgtcggcagccaaaggtggcagcgacttgtcctccccgggccgggaggctgtctcctcctgacaaggggccccagtggtcggggccctaaaccagctgtggcaaccgcccaccactggccaaatggaacgctcctcacgtcaccaggtcgctccagtagttgctcgccctctattggccgatcggcctcggcgcctccgccccggccgcccctatcccgaactgccattggttttgcctaacgccactcgacgatgcctccgcccactcctccacccatctccctgctgcatgcccacctgccaagccactgccagcctctctttggggtctgagcgccagtatgtgaagtgttgccttctattaatatagttacgcagagacggaggttaagggtagtgccgatgggaca

SEQ ID NO: 71147 - DNA, 1578 bp, Homo sapiens
tcttaaaagttgatgggagaaaaaaagttgtttaaaaaaatttttttaagttgatgggaggtgaggaagcgtagttactgatggccccttcttggataaaaaaaatcttttgactcaggaaatgaagaacaaagctgcaattacaagggatcaaaggcgatttttccttaaatggaaggaaacttgttatgttcaccatcggatctccggggcccggcacaatctggccacttaataggcattcaataaacccccgagctggcttgtggtcggcttgcaggacgccgtcgcacaaggacgggcgctgtagtctttccttctggattctgcagtgacgaatgaaggcgcgggctcagcccctgagagcgcagcaccgtcgccctaagctaacccaccttgggccacgtggaaaccaggggccaggaggacagacacccgcgcgccagagaaatacggggtgggtggagaaaggaatgccccacccgctgacagccgtttcatctcaggcctcccagttttctgcaggcccctccctacacggctcctgcttctctcacgcctcgtacggaacggaagtgacgtgtacgtcgcgagcgattgacggaaacagaaattgctttgcggcccgcacggaaattgctttccttcggcttccgttcttggtccatgtgagagaagctggctgctgaaatgactgcgaaccggcttgcagagaggtgaagggcaacgaggggaggggggattctgggtctcgttgggggccgggttccccagcttttgggaaatgggagccccccctttaacagatggcagtggttcccctgaagagctggccattcgttcctattttccgcgatccagcctttaaagcccttttaatttaatttcattcgcttactccgctcctcagctgtatagccgcatccctgttggtcctgatgctgtttctgcctccccagctcatttactgtgtttcacatttttcgtcacgtggcccctttttctgcctctgtcgcggcccgatttaatcctctgcgcaggcagtgcaggcgttataaactccccgaatcttggaaagctttgctgattggagtcatccaccacgttttggctcctgtgatgttttgtgccccccccaccccgcccccggaactaaatgtagtccgtttagtaatgttggctttgcaaatactaataatatatgctgttaggtaatggtacattttataatttgtttgtgggtaccaatctccttagttaagcacctactttactaagcaagccccagggaaagtggcttacccagctgctttcgacctgtttctccattcctgggaacaaggatcaagataacacttttgattaggctgcctatcaatgagtcaaatatatggaggatgcttagaaatattaatcgtgaaactgccttgcctccagggctagctagcaacagcgtctttggccatattattctagggtctgacatttttacagcttcccataggtcataggaaatgttgtgccaatccctgaaaagtgatagctcttttacatgcagttttgaagtcaggcatcact

SEQ ID NO: 71148 - DNA, 1227 bp, Homo sapiens
gctttagtttctccctggagtcgagcatttgcctgcacttaaaaaaaaaaatcccaaacctggaccccctttggggagggggttaacagtttccttaagttttctctagtctgagtaaagaaggacttccttctactcgtcctcaactatcccctggggcttcagcggggcgcgagagctcgggtctgggccgggggccgagcaggctgcgctgcccctccaggatttcctgcactcgacgcggcgaggccggctcgaacttcggcctccgacgaaggcaactccgcttccctttaaaatgcagcaactcccggcccccgcccccgcccctcgggccgcctcctccccctccccctccgcccctgcccaggccccggctcctccccgagccctcggcgtgggggcctccttgccacctgcccgctgcccatcccacatgcaaagcgtgaccgccggggaaggaagccgagcgcgcgcgcccacaccggccctgcgccgcggcgacagcgagcagctcgcctactccgtccgtctgcgcttacccagcatgcacttccaggccctgagctatctcggagccgcagccccggggtcagagcggccggaagaaacaggaagtttgggacggtcctagtcgtggggccgggagtcctaaaagacaggccctgaactccgtgctgcctctcccttcccccgctccctccctctggcggacttccctggggtccgtttcgggggctggcctgaactccgaaaatccagatgtgtttgggggtcattcaaggcacactcccagggttcccttcgcggtagcatctcctggctttatggatcgaggggtgggaggaggagggagtgctcccgccctggtggggtggtagtccccgagggggcgttgtcttctgcccgccgagagggggaaggacgctagattggggtggaggttggggggctggagatttgtctcccacggccaattcctgggcggatagggcagtggttagaacctatggcggagtccggacttactggctctccttcccactgccagttagctttgctctaatctgccctccacattgacttaggctgccccattaccctcagcactatctcacagacctgcgctgctgctcaccaggggcaccgggcaagggagccccattcctagtgcagagaacacaaagggcatgccctgttgaaagtgatctccattcgcacacccct

SEQ ID NO: 71149 - DNA, 1630 bp, Homo sapiens
gcaaactgtttctttgaagccttaaagaccaccaagaagtacacggctcaggcatctccaattaagtctgggccaattctctgggtgtctggtacacaaccaaccgactccttacttgccctgcaccgtttctgtttcactgggcattcaaatccatggatctcatctgtggtttggaaggctgagcagataacaccctcatttacacaagaaacttaggcgtagggcttaaacgtcctgtttaaagtctcaatcggtaaatgacaaagtctacttgacctcattgctctaaaaaggggggtggggggtggggatgccggggaggcgccgacagccagttgttctgggatccctgaacagcaaacgctcccgggaaaaggcctcaagccgactactgggttcaaatctcttgaaggtcaggtcggcatggctgagccaattcctccgcttgcaagactcagggttcggagtctgccaatttggaattcacgtgactatgtgttaagtttctcgcggggacgcgggggtagagggctgcaaggcacagggagcctaaggcgccaggccctcggacttggaggttgcctggaatgggtcagtcacctgggagccggttcctctgcctcgggcttcggacgcacacggtccgcaccaagggcaccagcttctgcttcaaagcacccgccgccaggcctccacaccggaacatttcggcgaccgctattcgggacctcctccttccctttcctctcacgcacgaccgacgggtcaaacaccgtgagccccggccagctcccccagtctcttcacacgcacattacgcagactcctcctcccagctccgggtgggcattggacagagaagccggcctgctagagccggggaaggggaacggcgaccggaggcctactgcgcaggcgtagcactcgctgccgcattgcgattggtccgcacggcgagaggatttgcgcatgcactagctggccgcaagctcgcaaagacgctggctctaggtagccggttttcgcgagtttgtggcacagtgttggactgaacgagttaaggaacctgttcaaggagggactcgtggggccgctttgattggcggttgtgcctggtgctgccgctgtgttggtgacgagaactgataacagcatctcacaacagcgtagccccggcatcgcactttgttttttggttttaggacaccagttacttgataccgaagccttcctgattcttttgcagtgatccagatccagtttttccatgagtccgaggcgcggaacctggcttcccagatccggcgtgtacttccatcttttaccagttgccggctctttcccacccaacccgtttcctggacaagtaattctgcgctcttcttcccgcctgtcacctttatttattagttcagttgtgtgtcctagatgctgtataccaggtgctacagatacacacagtctcctgctgtggtttctgtgcttgggagcaggatgttagcaaaaagcgttcgtgcttctcggactttctgggaagagaagtctgctaagcagaactttcagttatgggagtagggtgaggggctgagtgtaaataagtgttttgactctgccagatataagctaa

SEQ ID NO: 71150 - DNA, 1119 bp, Homo sapiens
aataacggaatagagcacgatttctgtgacagagaagggaagtccctttggccagaacaaggttgtgggcatggaatgaccggtcctgtgtggggggaacctgcgcagaaagaaggggtcacagggtctctgatgcctgaaagttcggaatcccctcaagtctcttttcgtttgattgaagagacttgagggtgggcgggtctccgtcaaacatcagtatcaaccgtacaaaagacgaaagggagttgcctccagaatgaaaagcccaaaccgggttggaaacagaccgacaggactcaggaggtgagaaggctgccgcagctgccgcggcccgcgaaaccactgcccgccgcgggccgccaggctctacctccagaaaaccctcccccttcagggcccggcgcaagatggtggcccaccagctaccacgccgccaagcctgtcccctcccccgcacccccgtcgatccgcaccggcatagagaccctcagccagccgccctcagaaccgccctctggggaaggctgcctcggccgcgcgggagagctgctgcctccttccgcgcggcacaggcgggggcgggggccgcttaccgagagcagagcagatcggtctgactggggttcggataaggaggaggagaaagaggaggaggaaagggaggagcgcgaaaaacctcaggcgacagcctcagcaacagcgactcccccggagacttccagcgcggaaccggcgtctcagccgggggcagaagtatataactgcacgcgctgcctcatgggtagacgccgactccaccccctgaacatccggggccttttaaccgcccacggacggacggctggtacttacatgtgcacatgtgcagctactttacttaccgtcgaaggcagcggaggaagtgtaattgactagcgtggatgcagcttttctaagcaaacgctcgatttaacctggagttgtcatcccaaaaaatacattgtacctgactacagagaaacatgaattctgggtcttccttgtgtgtgagggctaaagacacgagttaaaaatataaatatattgttttctggaaatactgtacttgaaacacgtgtcaaaatactagttatttttacc

SEQ ID NO: 71151 - DNA, 657 bp, Homo sapiens
tgggaggcggagcttgcagtgagctaagatcttgccactgcactccagcctgggtgacagagcgagactccgtctcaaaaaaaaaaaaaaaaaaaaaaaaaaaaaaaaaaattctgtgatgaagtcatcaccctatttaggtgctgtgattcttctgtggtgactgttttctaagtaaaagggcataaaagccactaagagtaatgtcaagaatgctgaggatttatttattttccttgggtaaatgtagaaagcctctttaatagcatttgctgagatttaggggtatgccaccaagcagggcaatgggctatactatcttccttaatggatagtacccattccttaattaacagctcaaagcactttgtcgtctgggcctgattttctaatcccactgaaatacagtgatcagggcacagcaatgataacccataggagagcaaattcaaagcccacctattaatcaggtaatgtgctaagctctatagcaccccaatcaccactcaggatggagacaaagaaaagttccatgtacaaagattcaagataactgggaataaaaagaactctaatctctggtaatggaaaaggaggagcttttagcaattctaattatacccaagcatctactctggggagctatgttggggcaat

SEQ ID NO: 71152 - DNA, 918 bp, Homo sapiens
gttactggtgttcaactagaaatcttaatatttaaactaatcaactaactgcatttcaggtactgagcacgctctttaagttaatggcatagctgctggtgggggagggggtggagaaagaaaaaaacagaagcataaactttgttaagttcccaaagctctgtggtctgtgctttcccaaggtaagttgagtaaaaggtgacttggcaacactgctaccatgctcttggaagtctggcaagatctcttggaggaaaaaaaaccccacatcagtcctggggctaatccacaagccgttttgctgcagtccttgttgctgaaaatctttccaatatgtttcagtccacttccttgccatagaaaatagagtatgacaaggataaatatagcatgaacaagatctggagtttggaaggctagtttgaactctggccctaccgtttactcaccatgtagcaatcacttacacctgtgtttgtcaaagtacgttccaaccatgtgcatcagaatcaccttgggtgcttgctaaataggccaatttccagggttcactgctaaagttttcacctgggtggcactggggactctgcctgttgaacaagtaccctaggtaactcttacacccactacaaatttgagaaacacagagcttcagttttcttatttataaataagaatgatgccaccctttcacagggtggtggtgaaaacaacataggtaatcaatatgtgctagttgtacctgaatctttggtgaagttattgcaagactacgagatacattctgaatattaatttaacaaacttgtgaaagccatatattatgtgatggtacccaggtgaaaactacatgttttcctgtcctttgaggggctcatagactagtgagagtggcagatatgaaaacaaaaactactg

SEQ ID NO: 71153 - DNA, 798 bp, Homo sapiens
ctcttagctccaaattcacccttgttgcctgctctgtgaaaatggttctgggccctttatatatttttcctttgccagctggcacaatgttaagctttgtcagtagagggcgttagggagacatttcaggaggaaggggcttttctttgtgggtcctgtgtgctggtgtgctaggtgtgctcacttggcaggttcctgtagttcaggctttcagcttccccagggcccagttcccacagcacacacagctccccaagcaccaggttcctgcagcatgtgcaatttttcaagcatgcagctctggtagtataatcagcagtgcccagcagcttctcccagtacccatccctcaggatgtttcatggtggggtgcctattgtgagatacctctctgtgaccagctttccctgacactatagagggtggatttcccagaagttccacagggcagaattccagcaagttctgctgatgtagtaccacagcaatttctctgctatttaatgagtcatgactgtgcccttgtcctgcaagatatggatctcagccctggggaaaaggttctctcctgggtgccctagttcagctctaggtgtaggggctgctccttatatttgttagtcctatattctttgtagttgtttttacttcttactggccaatcccctgttatagttaatatttatattaaaatttttctgttcaaattactgtgtgatttctctctcctgatgttttccagacatatagggttaattcctcttcctgcatctcaacattctgtaaggtgatgactag

SEQ ID NO: 71154 - DNA, 949 bp, Homo sapiens
attgagggaaaagaggaaagagatcacccaattcctgcggtaagaattagagtccagtcaccgcctaggcaaaaccctggacgcaaaccccaacttcggacctctgaggaggcacagagccagggggaggggggcggcgtcgtgggaaaaaaaaaaaggggcgggcgagttggaccaaaaaaaaaaaaaaaaaagagcaaagacagcgcgctcccgggctcaagagaactggcgcctagagctcaaaagcccacccccgactcccagtcccgataccccctcccctgcagaggtggagctgggtggagttaggcgctgaggaccgcggccccggaagcaccctcctccctaggccccctcagtcccacagtccccagccacggccaccggggctttctgcctctctgacctccagctccccggctaccgaagcgctagtccttatacagccgcggaaaatcgggccggcgcggcagttcctgggctcgtagtgccctcgcggcgccccacgccgcgccactctcttccgaaatgcccgcctcgcgcttccaggcctagacccggcactctggcccaaggctggactctcacacacagggtgcccactgcggcgtctcctattggctactggtcaccggggaagccggaggcccgagcccatggcttcatgggaaatgtagtttgaggtcgctggaggctgttcttcctgggggtaactcgtgttgacattggcagacagacacaagtgaggaccgagaattatgggagatggagttgcgggacacttatttctctatacgcacaattcttcccctccccttccgattgtccccagcgttcagacggggaagggtattctgggtattgtagtttgggtgcactgtctagagaatctctcttggggttatgggtttgtgcttgtggggacagacgaaggctctagatttat

SEQ ID NO: 71155 - DNA, 1081 bp, Homo sapiens
atatttattgaaggaatgaataagtgagggagaaagaaaatgggtgtcgtcaagagatgctctttactgaaacaggactacaaactcttagaaaaaaaacaatccatgctatggaattatatatcactctctctcccttttccaaatcatgcccaaggaattattgaaaatgaggtaacaatagggcaaaaatgttaactcattccatcttcacagatagttccccccctttgagtatttgtgacattatttctgagacagcagaagtcaatactcactattctgcttgaccagtagagtgctttccaagatcttgatcatcatttcactggtagattattgcagaaaccctcatgctcctaaacgaccataagaaactgagctcaaatttgaaggcatcacttgtatcctgtgaaagagaaaccaaagaatgaccaaacccctcagaaattatgtagctcctggctgatcgtcacctgctgattcctctaaccatgcttggggcaaaggtaatgcagctgtaaaactgactgtgaattctacaaggacttattgagcagacatgtctgagcaaaggaccagattgcacaatggttggcatcaggtgccactggggctaagtgcatggtcactgttcctctcttctatagtgatagattatctctgatgctggcttgctgcctcgaacaaatgccctgagtgaagtgccagataagagaagggatgagtccacctccatttataaaatctaaactaactccgagcccctatggctcactggacagccatcggtaagtggtgtctagaagggattgctgtatttggctataggtagacgaggggacatttgagtctctgaccattggttaaaagggcaatcttggaaacaacagacactggggactccaaatgtggaaaggaaaggattggagcaaaggttgaaaaactacctattgcatacgaggttcactaactacatgatggattcaactgaagcccaaacctcagtgttacgcaatatacccatataacaaatctgcatatgtacccccaaatctaaaataataaaaaaagaaaagaa

SEQ ID NO: 71156 - DNA, 1102 bp, Homo sapiens
tcaatgttgggaaccactgatatagaggctccataaaggacagaatgaaagatgaccatcatcagctgaatataaaccaaaaggtttagattctagagcatgtgtttaaatcatgcttacaaaattcctatagttcaaaactgaggtccatgaaaattttttggatgaagattaagattgatattaaattacagtttggaatcctgttacatgtctatagctacatagctaagtgaaacacttgtctctcagatccattgtcaaatccaaaatccccctcttttaaattttgcctcaaagtgaagttaaccagataccaaaacatattatttagcagtgtgagtctacagtgtgaaagaggaatgaggactggggctgaggaagcattttaataaacttgaccatgaataccataatagggcttattggcataacctgaatcagtacgtatgtacacaaggccaatgactcattgttatggagcaatggtctggactttgccactattttcatgactgccttctcctttgttctcaagattctccatttgcaaaataaggagcttaaaccatatactttcaaaggcggcctctgacctcaacattctagggttctattttagtgaatttgtcaatgaaaatattgcttaacaccaatgcttaatgttagtctgcaacatttgtaagagtaagctaaacaaaaatctcataggaagagtttgtgtattaaggttattccaggatgaccacaacatttgagtcaggaataagaccttaaaatggactctttcttacagagctaaatgtgtttaaacattatgtggtgtattattttaatattcttttgggagtgagacagaaagccaaaaaagaaagcccctgacccaggtccttcttgttctctgttccgaagaggaacccagtgacatcatgtccatatcttcaactttatctgaagaaattgtaccatcaggcagttaccttggctttacatcttttccttgttaccatgaaaaaataaggaaaggtctacagaaataatgttagttcaacgttttgaatgtgtataggcaatagcatttttctcttttctccatagtgaa

SEQ ID NO: 71157 - DNA, 1702 bp, Homo sapiens
actccctttgaccttttctgcactacagatggaaaattggctgtggcaacaaattaggctgacttctggcctagtcttcgtttgcatacaagtataactttgttaacttcaccctagcctctgattggttgctttttgcaaccaatcagatatttgcacaggagtgtgacctttgtaacttcagtttagcctctggttgtctcctttctgcaaccaatcagatttatttcgggcgaccactccacttacatgaggtggccaatgggaaacttctagggggtatttgaaccaaagaagattctgtatccaggcccttgagcctctgctgaggccatctcccacagtgtggagtgtactttcgttttcagtaaacccttgctttcattcttttgttacttcattcttgctttgctttgctgggcattttatgcaattatttgttcaaaacgccaagaacctggacaacttgcaatcctgaccctctacgggtcacaaacccaagttgcacccaactggacaaatctccagtaatccatgttcagtggcgcctttatctctggaaggcgttttttcaaacagaaagggcgggagaaaagggctccaagacagggcttgattgaaaatgtggaaccctactgccaccgtgaggaaatcgtttaaagacggaatacgccatcatggcgtccttctcggaaagcctccctgtgggggaaaggctgatctgtaggcccccaggctatgtcttcctgccttttcctctaaggcctgaaaagagacagggacattggcggtatcttggtgtagaatctggagagtgcggggtttggagtgaaccagcagctgccaggaggtactggcacaggaagtcgtggagcggaaacttggttcctccggtgtggggaggacagtagggaaccagtcaaacacacatagaggctcttgtgggcatctgtctcttctacctgccctttggagcaagagtcagcaggctttcacttgctagcatcttgctatgggtcttggggtttctggtagcatcaatatcgctcacaaggaacacagttattccaagggaagtttacaggatttgctgttagaaccttcactctccaggttctacagcaaggtaccgccaatgtccacgtctcttttaaggccttagacgagaaggcagggactctgagcatggagcccaagcctcttccacctccccacagaccagaccttccccaacaggtagtcctcacaagacgacccatgtaatggcgtagggatccgttaaatgacatcctcgcgatggcggtagtgcatcagatatgccagaaagccctgtcttggagcaccgcccccttctcctgcccttcctgtctgaaaaaacgcgactcatagacaaaggcgcaaccaaacatggatgccttctatttgcccagtgtggagcctgctagtcttactgctgcactttttcattttgttttccacttgaaatcaaaccgaggcctaaagcaccggtcctcatcaggaatccagttcttccagaaattaaatatcctcctgacctactctgtgtgggtttgatttacttcagagttacaggtccagtaatttccgaggcatcaaactgtctccttcagggaatacattcagtggatgaactcacaaaaaagagaaaaggagccgggcgcggtggctcacgcctttaatc

SEQ ID NO: 71158 - DNA, 1738 bp, Homo sapiens
cctcctctatggctgatgccaaattactgcctatagtgcaacacatgaggctagaacatgaagaactccctggttgtctgggcggggagccagatcaaagaacaccagaatttgtaaattgcttgccagagaagatctccaagtttcaagtaattttctccttgtgccttcatcccctgaaaaagataattttataccatgaagtgtactggccccttaactctgtgaaataaatcgcaccctcaaagtcttggacaggaggatatttaatttctgaaagcacaagattcttaatgaaggcgggccttgtttgatttcaagtggaaaacaaaagcaaaagtgcagcggtaagaccagctggccccaaactgggctaaatgcaaggcagccatgtttggtggcgcctttgtggatgcgtggcgttttttcatacaggaagggcgggagtagagggcgccaagaccagactacttagcatatttggagcactactgccatcgtgaggatgtcgtttaacgaaaccctacgccattacagagttctagtgtgggctacctgttgggacaggtctggtctggtaagaggtggaagaggcttggcctctatgctgggaggcctcgcctactcctctaaggctttaaaaaagacctggacattggcggtatcttgctatagaacctggagtgtgaaggttctaatagcaaatcctgtaaacttcccttggaataaccctgttaattgtgcgcaacactcatgctaccagagacccaaagatccatagcaagatgacagctcgtggaaaacttctgactcttgctccaaggggcaggaacagcaaagagatgcccataagagcctacatgtgtctttgagagggtttctgctgtcctgcccacaccaggaggaactgaggccccgacccacgacttcctgtaccaggacctcctggcagctgctgcttcactccaagcccctcaatctccaggttctacaccaagataccgccaaattccagttctctcttcaggccttagaggagaaggcaacaagacctagtctggagcccaatcctcttccacctcctcacagaccagactttcccccacagcgaggcttcccgggaaggacgctgtaatagcctattctgtctttaaacgatttcctcacggtggcagtagtgcttcagattttcaaggacgccctgtcttggagcagtcttctcccgcccttcctgtctgaaaaaacgccacccagagacaaatgcgccaggagacatggctgccttgcattttgcacagtttggggcaacctgtgcaaattcctgtacttttgcttttcttttccatgtgaaatcaagtcaaagcctaaacgacccatcctcatcaggaatcttgttctttcaagaaattaaatgttttccagacttagtctatgtgggttggctcagtactttcacatggtatcaaaatgtctgtctcaggccggaaattagaccgatcagagaagaaaagcgataataaatggtcagaagcctggagatcatcatgagccaccaattcacaagtctaggtgatctttgacctattcccctccccagacaaccagggagtcctcctccattttctcagtttatgtgatgaattgtcagaaagtgtttggtagaagtaggaagagaaggccaagacagcgcacatcattgtatgtaatacattgttccacagggcatgatacatatact

SEQ ID NO: 71159 - DNA, 937 bp, Homo sapiens
atgcatgaatttcctgcctactccccggtcagttctggccacttctacaactatatcacacctttgtccacagattctagaaggtctgagagatgaaggcaaggacatcacgcttgaggccagaagccgtcccaacttccccacaggtgcaaccttccttgacatcctggttttttgggaggaattgttcatggcttggattttcatcaactgatttcctcacgatggcagtagtgctccagaaatgtcaaccagccctgtccccagggcctcttctcccgcccatcgagtatgaaaaaacgccaacaaaagacaaaagcacatggaaacaaaactgtttcaattcttgcccagtttgaggaaacttgttcacaccactgtgcttttgctttctatttccatcttaaatcaaaatgagtccttaaccaccccgccctggtcaggctcttccgttttccagcattaaatttccaccagatctttggcttcacagttcagctcttcttctctcaacattagttcttcagcattttctcaatttattaagttgacttcttaaagttgaacaagactcaggattccaggatgaaatgggagaagaaaacgccgtaagttccaggcctggaaaaggtcatctctagtcacctggcatcatggtccttgacgcagctttctaggttaccagggaatcttcctccattttgtagcagacactaatctttttgtttggtggaaggctgttatttggccgaattcctgagattattttcttatagcctatatagctctcattggtttgacatgtcatatgtgacataccaaatgtacctttatatttatttatttattttcgagacggagtctttcactctgtctcccaggctgcagtgcagtggtgcaatctcggctcactgcaaactccacttcctgggtccaa

SEQ ID NO: 71160 - DNA, 1239 bp, Homo sapiens
actccttccttcttccccaccaaccccaccaagagacctgagatgacggcaaaactctattaggggacaggccttggctataggtgtaacattttttggcctcttagtgtatgcctctgctctctaagcaggagatttggccttttttggctcggcgggatggctcccaatgcttcttcatttccctccttgctctaaggcaatggggtccagacttttgctgtgtatgagatcccccagcaagcacaaatgctgttataagttatctcctcaaattagcctattttatgagctgtgatgctgctatcacaaggagctcaggttctatggctccagaacaaggtgaattggcctgaaccatcttctgagggacaggggcaggaacaggagacaatgggcacaagccctgcactgggccctgaaagttttcctcaacggaagccccacccgacaacttcctgtgcccggacttctggcagctgttggctctgtccggcctcgccaacaacaggtttttacacttggatatcacctttgtcatattagcatcaagtctttgcccagagctcccggaataattcagagaagtcagggaagcccaatttcgggtcagggcctgttcaatctctccgctgaacgggcgtttctaaaccgaaagacctcacgggacggacgctgtaatggcgtagggtattttaaaactatttcctcacgatggcagtcgtgctccagatatgccaacaagtaccgctccctagtccttctcccgccctttctgtccaaaaaaacaccagcaagaaaaaggcgccaggaaacatggcagccttacttttgcccagtttgggacaatcttatcacgctgctgcactgttgcttttggtttccatttgaaacgaaactgaggccttctctttttaagaactgcatttccaataggtttagctttcacagttgtgttctcgctcactcagcatacatctccagtattttcccaagttatcacgttgtctgcttctggattcaagactcaagaatccaggcctaagcagaaaaagaaaatgctacaaactcaaggccgggaggttatctctaagtaccaaaccacatgtccttgcctggctcatccatctgtaaggctcccaaggaattctatattttcaggatagagatctaagtcttatgtgttgacttgttggcagccatttggctggagtcttaagagaagcgcccaagtagctc

SEQ ID NO: 71161 - DNA, 767 bp, Homo sapiens
ccattctcttcccaggcccagccatgtcccaggtctccgggtccccgggttctcctctccgcgtgccgggagagtctccagcttctcagactccagcaaccccagccaaacctcttcgctgcctggagccttggctcccgcgacaccgcccggctgcggggcgggggcagggccaacggcggaaccgcccccaaccgcctcccaggccaggcgagcaggcgggtggctggggcgcctccacctcctcttcctaaagcggcgaggcgcagaggagcggcatcactcgagcccaggtcccagccaccaccactcacagcgctcggcgttcaggaagaggagcagcagcggaggcggctgcttcagcggcgggcgggcgccagaaaggtagactgagtcccagggagctgcgccgctaacagcccacctcctagccccgggctacgcgccgccagcccagtaaccccacttttgtgtgtcctcccaggccccgatcgaaaagcctgggagggccgccgaactacccccggagggaggagccagtccgaacccaaggcgccaccgccgcagaagcggagcgaggcagcattcgcctccatggcccactcgccggtggctgtccaagtgcctgggatgcaggtgaggaagcgcaggccgcccccgccgcccacgtgactgcttgggagcccggtgcgccctcggtgctgggcaccggcgacaagggacggccccagggctcccctgagggcagggccggtcactatggccag

SEQ ID NO: 71162 - DNA, 699 bp, Homo sapiens
gccacagtgctggtgaggagagggcatgttctaaagtcccttcagaggtaatggaagagtgaaactcaaggaatgaggcaacagctggatctttcataaggcaggcatccaaaatgagatttccttaataccaatgaatatgtagtaaccaagaaaatggtttctacaacttcattattttctgcctaagtcggtaacatggaactggctcagaaatgtccataggttcacacttttaagctaaaaagtaattacatggttttagtgaagtcctgtcttcagcagttggtgtgttgaaataagcatcttcatcttcttcatctaactgtagactaccagaagacaggcggattctggccatgggtgaccttatttctttgccatacaaagcatagtagtctggtttaagaatctctgattcagaatcactggattcactagctacatacctttctgctgtactttgatccattagaactgctggcaactcctgctctgcaaacatatccgtaaacaggtctgctttatgactgagagcaggacaaggccctaaaggtctaaattctgacccaaaaggaaaacgaatagttttcatgtctgattggctctgggaccttttaggggtttgctcttgaatgttacatacaaatgcatcttccaaatttgggtcttcctcttctagacctacattgatgttgc

SEQ ID NO: 71163 - DNA, 1179 bp, Homo sapiens
tgatttccagatctgcatctccagcctcggcttcttttctgagctccagacctgtctatccagttactaactgggcaatcctgctggggtaatctatgggctcctcaaactcaagatgtccaaacaaatctcactgattgcctctattgcttatgtcaatgaaaatcccatcagtctagatttgtcttcctttgtttctgctcacatctagtctacaagttctgcctctcttaactgaccatttctctttgtactcaccacctttacccttgtctgagtcttcattatactttgtctggaacattttaatagcctcctgtgtgatttgcctcccacaccaaaccattctccacccggcacccagagtgaaaatgtcatagcacgaaactggctgtttcaccggctctccactgcctacagggtaaagttcagtttccttagcaaagcattcaagagatggccttttggactttgaacctcatcttttggtttgttccaccacttccccagagcttcagtcatatcagactacttataggaccccaatatgcataatggttgcatgcctttacttaaacttttctctctgcctggaatatcctccttctcaactcacaattacttaggaaaaggctaagggccagatcttctgtttgaagatgaggtaagagaggcaaacctatgcacctatgcgagagcttacttactcttgggggaagttccagcagacacgctgttggtaaattgcaccttttacatctgggctctggagccctatggcgtggtgaccctggatcccttccaggagctgcagggcaaagacaacttctgtggtgaactcttctggatgtgtgtcagttccgggtgaggctgcaaggctgccaaattctcaggctggatctcctgctggcaggctgacagtttctccatgccctgggtgccagcgttgtgaaggcttctgctgcggggttgcagttccccatagttccacagacagctagaccttcccttatcttagggcctgattcaaaaccgatgggtggataggaccattctcatccctactggctcctaggcacagtactccacctgcaaaagtgctgttgtttctctaaataacttataggataacttctctctctccctctctctcagcatttattcaatcaaccagtattt

SEQ ID NO: 71164 - DNA, 3405 bp, Homo sapiens
ctaagatttatgaatctagttgagaaacttgagagagaaggggagggcggcgggagggggtgttggggggtgggaggggaaggtgtgggtgggacagacacagaggacttatctgtgcaacagataatcggctccaaataattttttcaaagtgctctatttacccgagattatttgttagatgttttgtcgtgtaagttaatcaatacttgttgaattgagcaagcaacttcagaaggttatattccaggcgaaatatacacagactgacatttctttttcacttttctttcacttaaaaatagctttaaaatatttgttgacgcttgttactttttactacgctctatagaaacaacccgatagtcttccatggcaggagtaacctcaaaaatgcgtcatgtctaactttcaaaagcaaagcacagtcattaatgcacggttcaagcaacccagaagtcgatgtcggattaccacacccccttctaacaaattacaagacttggtttggttacctgaaaagactgttgattaaccaggctataaaccaggatgaaaccttggccgtttttgatgtagagatctctcatggaggcaaactgctcagttcctgcggtgtccagaatttccagcacggagggggaagagtccacttcgatctctttgcggtagaaatcttcaatggtggggtcatatttctcaatgaaagtcccagtgacaaactgcacagtaagggcagatttgccaacccctccactccctaacaccactaccttgtattccctcatgagtctcaccttcaccaactcctaccagagggggggaaagatcaccccgctagctgtggcgcggctagacgaggcggaaggtgggcggaaatctgcgaactggggaggagagtgcagaggagcagagggcccaaccggggaagaagaggaagttacaggagggggaggggaaagagcgtagagtcggggagggtggggaagggatggtaatgcccttcctataggaactgcagcccgagcagggggcgtggggaggagggcgagcctgggaaaagcccggcgagggtggcgaggaggcgcgtgcccccgggagggaaagggtgggggctgcggcgaggggaccctgcggcgaggcggacgtcggaggagcccgcagcccggggctgcccggcactcctcccccgcccttcacacaaaggggcccagggaccccgcttcctgctcgcgcagcccagccggctcaggcctgagggctccgttccagttaccgctgcccgggcgggtttctgggccccggctcccgcgggggtcgtccggcctgtgaaggggagaaggacgcacattacccggctgacccccgccccgaacctgcggcgccggccgccgcctcccccaactcccacccggatcaagctactgccgcttaccccgccgtccgcacccgcccggccgccggggaggctctgtcacgccaaggccatggccacccgctggctcctctgtctctccgctgccccagcgctgctgctcgccgcggggaaagaagcgggggccttccgcggcggccgcagggactccaggcgaacccacctcttttttttctcacccaccccccacccccacccccacccccacccccacccccaccaagcacacacccggaagggtttccctgacacactggctgaggtgccccagttccccgagactggacgggatcacttccggtggggaaagtcccacctcttcggggcgagccgggtggcgctggagccgcgccctgctgagcgagcgagccggccggggacggtttcgggtcgggactccggcttcgggaacgggcctctggaaacctgcgacgtcagtccttacccgcccgcggctgccgcggaccgtcccacccccaaacccgtagaagcccctccgacctgcaacctccagccgcccggccctaggacttgagcggctccctggccggtgcggaacctgcgggctaataatctagcgaccgggagaacgccaaacatccctggactagaagttgcaggggaaatcaaacagcccagaaagtttattctccttgctggtatttcttccacttgctattttgctgagagatgcatgcaaactacccttagactttcagatgcagtgcgttttacttagccgtgcctgacaaacacacagaacttttaccgtctggtagatccgccttgactttaccagcgaatactaaagtcacttaaaaaaaaatcacaaggctcgaaaacagcagcattagaagtagactttatggtactctgctcagctatgttctcatttgattccaaccactacacggcagaaaaggtaaccaatattcaagaaagatttgattggaaacggtttaggcctaaagactaatttattttaatcgttgattatgtataacaatttgcttggctggctcttacatgctgaagttttgttttaaaggccatcctatgtagtctttgaaattcaaaagcaagtagtaactctggtgttagattctaagtttctatttttagataaaattgttacttccgactatctttccctttgctagctttctatttgtaaactttgtgtcggatccacagagccccagggccaggagtctaggctgtattttaggtgtgtcactttcttttcaattcaagcatgtacccagaaacctgcgagactcagtggccagcctagcaaaaatgactccaaattcccttacttacaagccctaaatggccaaactctataaagagatttattactcagcctaaattgttggacattagaacacaggcgaatcatagtagtgtgaggtcccactgtccctccctgagtattccccaatgtcacttacagtcttcaaaggagagtttagttcaatttctccttgacctcaggccggtgccatctctccagcgaagtccccagctctggctccagctggcctgggccctgtgtcgtatcagaggcactgccctctgctggaaggggtttggtctgtgagttatgagtttccccacaggtcactgctcctttcacacgtgctgttgcctgatttggagctctgctgctcatctccctgcctagctgtctccagactgtctggtgggattcacagccctccaccagccgtgcttgtaactgagtctggaaattcctcttctgatccagccagtgttgagcaatcgtggcaagtctttgctctattactaaactgtcaaagcaaggagttctttttcaggtcatcccacctgttggcaattctaatatctctgaatgtgttggtcatgcttaggagagagttctttgtttctccacgcagtgaaacatactcctcccctcagtacagcgtcctgtggggtcactctcg

SEQ ID NO: 71165 - DNA, 900 bp, Homo sapiens
tttctgtctttgcattctcttagcaagttacctgtgatgtacatcacattctggtttaatgtttgttcaataataagagtgttttctttctttactatctttctggagaagatttctggattgggagaagatctcttgttttattacatttccccaacagtgctttaacttgcctggaatgtacagtgatgaagtttttccttgattaaactttagtcagattcctctgagtcctcttcccaacttggcctcaatgtttacacttccatgtttgtctttgcattgctcaattttagcaagaatcttgccaagttggtttagccagaagcccacccttgatatctgatcaggtttctcatcctctaccaactcccagttgatgtcttttcaccctgacctgtcttcagcaagaatcctgttaggtcaggttagccagaatccaccccccaccccaccctgccccttatctctgatgtttcctcttagtaatcttccatccactgtcccctaccctgctccttggctataaattcccagttttccttgttgtatttagaattgaaccctgttcaatactgaaatctcttttcccatatggcaatagtcctgaataaaatctgtttttactgtttgaaccactgttcacctttggcttgcttttataacacattacagaaggcagaggggaaaggtgaagggcacgcccaagggcagagcacgaaagagtgctatgtcagagtgtagactattccatagatattgaggagctgtaaagattttaatcaggaatcgaaataatccaccatctgactttaggaaaatgactctggcagtaatgtggaggatggagcagaaaggagaagggtcaaatggcgcagcactgaatacattcataatcat

SEQ ID NO: 71166 - DNA, 685 bp, Homo sapiens
aaagtcttagtccccatcttatgctttcccaccctcttcttgaaaactacattgaacctctatgggttaatcatcgtcttctgtagccataaggtctctgcaagcatgctgactgcaggctcctcagattctttctccattccctcaagtccagtttttaatgaacaggctgtttgctttagcaggtgctgttgctggtattcatccagttacactatgattttttaaaaataaatctttccttgtacttgtacatgcctgcattgcattgcatcacttatgaagagatagctccctctctcatcaggaaaactggatttgtgtgtctatgtctgttgcactttgcaccggatgccctgcctgccttttcactgtgttctttccatgcacaacagaaaaatgctgggctgcactggccagaactgccattgtatactaatttctgcatccactttagaatgctgtgcttttgctttggacatgtttgtacaaatgggaatcagatagtctgtccctctcacaaagctatttcctggtggctgccctttgtatccaaaatcctctgtttggagctcttggcttttattccccagacacccactgtcctcctgcctaagggagtagtgtaagtcaggcactgaacagaaaagctgggaaggtttagttaaatgcgcatttctagtac

SEQ ID NO: 71167 - DNA, 549 bp, Homo sapiens
ctgtttatgagaaatatatttggtaaacagaattatgaaaatgatgtaaaaaggtggagagggatccaggcagctatcagatgattcaatttgagataaaggaaaacctagagaggaagacttgtttatggccttcatggtttggaactcggtaacttagccacaggaatgccagccatgaatagcatacaacagaacctgaggacttggcacatcccaatgcaacctcaaatgtgctgaatcaacaatctctatataaataatcaaatgaatacactctactgagtcaagttcacctgtgtgtcaggatctgtttccatgtgaatcaccacattcaaagagagaaactaggggaatttcccaggttttcctttagtttggatatggacaggtgtagatatgcaaaatgtccaaataaaacattttaacagcctgtaatatcatattcactttataaatacatacaccacattcagtagggagaatctttcctcataactaaaatttctaattgtaaaaccaaaattttaaaacattagctttgcttca

SEQ ID NO: 71168 - DNA, 1256 bp, Homo sapiens
ttcattatattacgagatcaaagtaaaatatctgtaacctgctaaactgaccctgaaaacaaaccattctttccattcctttccaagtttttgtccactttactaatgatgagttattcaaccaattaggaaactcaatcatgtgatattaaaggttttcaagtagctgtaacacctctgagttaagaattatctggcagacgttaatggcaaattcagggccctcaactttatttggccagtctctattggaccatcgacctataggaaatgccctcccatcaaaggcccgatttggcaacctatgagaaagaagtagtttgtccctgttaggaaaagtagctccattgtccatatggatgaggaggcaccacatccatacccagctctgcccatggtgctctgggctcttcaaagggcagaatgtggtttcactttctccccactgcttcatgagaaaagcagcctggtcgcttcctggcatttaatgaatggtcctctctccgtggatttggactgttggtccttccaaccagtcattagctggcaggaaatgccctcctcagcaatcactattgtgtaaataaagccataaactttcgaaggcccatgcaatcccagaccacaaagctgcacgtgtggtgggggagggaccttgattgtaaaagcactgccttccaaattaaactcaaaccacatgatacagttcataaaatatacaaaacatgcagcccagtgacagatttattgtggccttacagaataaagaaaaaaaaaactctatatggaaaacacagctacttttgactcaaatagccgccaaacaggaagttaaaagcaaatcagccagctgtggcctcactaagttatgagggagcccagtgcaaccagcatttcctgtcattgcttgtcaccgtttctgagtgcctctgtctgaactgttttcttagatggctaaaaatattacagagatttctttggggatagacacaaggcaacaaggaggcctattatatgatctaggcttgaaagtgaaaaatgtaacttttatccaaaaaacattcacttaacacaggttacagattcagtcacttgaaccactgcattttaatgaatattggaataaaagcccacatttgtaaaagaatttaaaatcagatcttaggttgcctagctgtttcctgttaatttagaatatatattcagaaccacaattttcatgtgcctgattagtaaatgacagagctggagactac

SEQ ID NO: 71169 - DNA, 1785 bp, Homo sapiens
aattatgaaaccacaacaaagaatcacttaaatgtcaactttcattactcgtctgggtttaatttcgttttcttaccataaaagcttattgtgtgagtgttaaaaactaaagttccctttttaatagtctcctaaaatctactctcatgcccttcaaaccccagtagtaaaagcgagctgcccaaacgtgttgactcagggcaggaagagacaaggttctgcaaggaagctgtggcactgctcacgatatcgcgtgaaaatggggaaattcgttgttaaaaagcatttgctgattatatgccatgcaagaagttcctttaaattaaaaagaagaaagtagaaaaaaagaaagaaggaaggaaggggaggaggaagagaagaggaggaagagaaggaagaagaaaaaggaggaggaggaaaggaggaggaaaatgatcaaagctctaaaatcgcaacaaagttgcaggatgacttttcctcctatttgctattttgtaaaatgaagtttaaaaggcattatttcctcggcgtccgaggaaggcagcctctcttacaaatcccaattcatctccagccttaccttacgctgctagcgcaaacccagaggctaaggggccctgctctcagcggcagcagcaggggcagcggcagcgacagcggcacatgccatctgttagcggcagaagcaaaagcagcgctgcgcgaggtggccccggtgccgggagagcctttagcaggggtgcatactgaatgccgccattttaaagcgaggttcctgaaatcattagatataagcaaattaaagcccgccccacctccagaacttcagggctgggacttgcaacccggctccaagtcggccgctctggggtataaaatgtcaagtctacagacacgcgcacgctgactctcggacggaggcgacggttccccctctcccttcggcccccttgaccccttcgtgctttttgcaagactcctttcggttccaggggccagaatactttcttttctgggctcctcgaggccccttcccggggccggccggcgggctgtgggaggaggggacaaggccacgggccggccctacccgctcctcccaggctcttggttcagtccactcggagcacacctcggagcgccccagctccctcgcggaggccgggcgtggggctcccgcccgggctcgcagctaccatagcaaccccggtcccaaccccgcccggcctttgccaaaggcgtgccctcctcccgggccagtgccctccgccggacgccagacgtcccctcgcgcagccccgccgaccccaggcagcccgggctggggccgcgcctccgtgcgtcccgcgccggacagacgcggcacgcggagggaaacggcgccagcgaggggctttaggcgccaaaacggaaactcccgcgaaactccgcgggccagcggagcgcgggcgggcatccggagcgccggactcggaagcggcgcacgcggccgcccggccccgccccgcccggccaggtagcgcggcgccgccgccaacctcacctggctccgcgcgccgctgcgggacgggcgggaatgcggccaagggccgccccggctcccgcgcccaccccggactctctggcctccgcctctctctcactgctcccaaagagcgccaaaaagtcgcgctgcggctcacgctcggagtgcgggcactttcttcctgtagggcgctgtttcgtcgcgaaatatattctttgtgtggttcgctcactcgtgcctggttctccgagagcgcagcg

SEQ ID NO: 71170 - DNA, 602 bp, Homo sapiens
agaaaacccccgatggttttggcaagtatcgtgaaagtcattgggacaatgcgcagggatggtgtccgatactttgttatactgggtagaaacatagcataagtcaagagagtaggagttgctagttatttgagaaaagggggaaaagactctaattcctaaccacctcttcccaccttccttcaaatttgccgaattgcctgaactgctgtaaaagtcaaatgtgtctgacatacaggaagtggctttggcagtcccaagatctaccacagcaaaaagtaggcagtgttggctatcacagtcagctagagagaagggcatgggtgagttacataactttatacccaatgctctaacaaatgaggaactgttatcacagtgagtcaacaaaggagtctttatattaaacatagcttgggtcaacaccagctctcttacctctgtccaccattgcgagccacatctgtgggacattcggggttttgctaataacacaaaaactggctcaatcttattgaactgctgaaataattgttttgtcttaaatttaaggcataaataggtcaatttgctattttttgggatactatagcttcaacatt

SEQ ID NO: 71171 - DNA, 1024 bp, Homo sapiens
cataatatagtgctttacctaatgttaaatttagtactttacataatattaaaagagcagaactgccttggaggtagatagagtctagatatcaggtcatttttgtcctagtttgtgaatttagggtttctactttcatccagtttcttgcctgtttttgtgactgtccccttaacctctgttatcagagcatctagaaatagtgaagaattcactaaattagtagtctggagttcaaagggcaattgttttatgtaagtgttttaaaagcttatcctccgaaacgtaagcaatccagtaaatctatccagtgtaagtgtgttatgattgggatggattaacctcattccactaaaagagaaatgcagaactctatgttgcagccaaggtgcactggttaatgtccatatggattgacaaagtggttgtttggttgtaagctgacattttgctttccaacctcagaatttgttcatgaaattggtatgtgccttagagtctgcttagagtgaataaaggatatgtgcatgtgtgtatgtttgctttgggaggaggggactaaatgtggccttggaagttcgtagaaaggtcatgatgagtcaccaaagatcataatggtaaaacattatgttgtgcttataatgttgagggcctattctaagtgcttcatatattaattaattcactgaatgctgacaacatctctgtaaggtagttatgattattattcacattttacagatgaggatactgaggcataggaaagttaaatgacttgcccatgatcaaacagggttggcatacaaactaaaatgggccagcttcaaatttgatactgccaattactatgctgcctcttacataatgatgtggggtaagaagcattcaaacggctttcattacccttaaagccatatttttcagctaagtagcctcagcagaggcttccctgtgaggaaacagcagagtgtactgctcttctcaagccttgtcactgatggtggcagtctggctcaacagaatg

SEQ ID NO: 71172 - DNA, 1496 bp, Homo sapiens
ttagcactagcctttgtcaggggatacacactcgagagattctaaacaaaaagggctcatccccacctggtaacaaccacaacaaaacacacccagaatttgctttcagtccattttccaaatgctccatggtgcttccaactaattctcaacctctttgtggttctaaagattggagaccactgatccaatggaaacggaccagagagtaagaaagtctaattttttcccctctgagccaaatctccactaagtagcaagatgatgtcaacgatgacatttgtatcttcatttggaaaatgagaggcttgggcttgagggccttaagggccagtccttgcacctctggttttcagtgctcccgagtttctgttcagtgtgaaaatggaaacgtgatattattgaagcacacacttgaaacataatattggttggttgatgaaaagaaaaaacacttttctggcttgctggcttctggatttattcagcttgccagagggtgggaatagcaccctatatctctccttgcccaaaaagcacttgagagctgctacctttccattatcttttaacagattactctttaattcataatacaatttttcccattttgtggtgtgtggagcctttgccaggattttttaattagttcatgttataatcagtaagttacaacagaactagcctttcttagacttatgtctcatcttttcaacccagtgaccacaatcacaacaacaacatgacgaggacttactgaatgcctgccatgtgccatgtgctgtgctaaatactttatacgcattatctaattgaacactaatgctgtctcatagggataggtatgattaatccccatttaacagatgagtaagcagcctctgagaaagcggaaacatgaacaaggtaatacagtgtgtaaggggttaaaccaggacttgaatccaaagtctgactgactccaaagtccatgctctttctacattaatccatgatcatgataaccgggctcacgagcctgggccagatagcttgggaactactctgccacaattcaaggataagtgaatccttgtgaattctaaaattataaaataaattttaaaacctagtactgcgactaaactgaatatggatttatgaagaaagtatacttgtcttttttggaaagtcattgtcaaaatgactctgtttgcctggaaagttaacctgggagaatcacttttctttcagacataggtgatcatgctctcctacaaacaccttcacttctcaactcaacatcacactcttttctcttttatctttcagcaaatggcgctgtggcattattgtatttattagctttgcttcattgtgatactaagttaccataaatattataatactattaattctactttacagtacaataaaacaaaccagtaatcctacaagagaaactatagcaagcaagcaaacatgttaggaatgcatgtaataaataagggaatgta

SEQ ID NO: 71173 - DNA, 624 bp, Homo sapiens
tctgtattgggcttactacacatcatgaaatttgatttttaaaaataacaaatcctctgaaatgaattttctcttcctctttaatgtatgattcagcatatacagatgcatgctgtcctgcattagtctgctttttaaaaaaatgtaatcggaatcaaaggccaaagtagcccttcctaggtcattcccttggtttaacctcagttaaacagcaatcattttcaataacagctatttcaactcactctccagttgacttgctttagcttatgttgcaacagagtgatcacaagagccagcacagtgttgtggaatggacataagttccacagtcagatagtcctgggtccaaattccaactctattacttactagctagataaccttgggcaagcagccttatcagtctaagccttcacttacaaaatgaggattaaaaacttaaccttcaaaaagaccgaaagtattagtgaggatgtggaaattggaaaccttgcatactgttgatggtaatataaaatggtacagctgctatggaaaacagtatggaggctcttcaaaaaattaaaaatggaactatcatatgatccagcaatcccacttctgggtattcattaaaagaat

SEQ ID NO: 71174 - DNA, 1241 bp, Homo sapiens
ctgctgttacaggatggaaaaatgcatcataggaggttagaagcttgttggcctcagtcataaagggataagaaaaatgagaattaggcatagggcaggaaggacctcactcctcccaacgctttcatttctaaataatgcttaaggaaaccatgccagggttagtaaaagagtagaggcacaaccacggtaagtgggcattggggaaagaggaaggagggcaggacatggggataaagcggtttcttaactgcgcgtgcgcccctggcaaagctgactaaggcgcctgaagtgacgtcattgcctgcatcacaacaggcgtcgtccggctgatagcttatcgcaggctctgaggggcgggacccaactgattgtcaaaggcggcagattgtagtttttgttttggccggaaaggcttaccatgagttgccagggctgagagagatggagaaggattcgcggcggtgacagattaaattccccagttacattatagacttggaggtgggggatcttctcatcgttagaggccccgatcatgggagataggcggttcggagccagttctgcctaactttgtgttcactgatgttagggctgctagggctgcaaaggtgggcacccctactcgcctaagagctttctcctctcttctctttttcccctttgcctctctccttacatcacctgcccactaagtagacttgtccttgtgtggacgggagccggaaagccttgagaacttattcctcgacccggacatggcacaggagaaaatgaaactaggtttcaagtcgctgccgagttccactaccgcagacggcaacattctgagaagagtcaacagtgcccctttgatcaatggacttgggtgagccgggttgagatactggaggaggcaagcggtggggaggaggtgttcgggaaagtgatttcctatagaattcccgtccctttatttgttgaggttctgcaggtaactcccttgttcctggtgtccggagatcccaccctcaaccttgggtgggggtagtgggacgggctgacctgagggggagcgcgcacccaccctgaggttgacaaacatctgaatctgaacatcctcccctgatagtccactcggacccgaaagtagcagccagttggtgtggagcacggcttttttctaacttcaacccatttcttacccactcctttgaagaaacttagtatcctcccccactcacctccagatcttctgc

SEQ ID NO: 71175 - DNA, 1128 bp, Homo sapiens
acttcagctggagagggcagatgtcaattactttctttcaaagggggaaaccgcagaacattgattaagggcaggagggctggagagggagtacaaaatggactgtcctaggatttcagctccacctgactggggcccagccttcccagcccacgtccccacaccggccgctccatgtgaaaccggtcatgtgagcctgtttacagcagagcagctggtgcaaccatcaagatccgtgcagaggtctggggagggggaaggatacaggccacgcaccccctacaccctaccccatttttccaagaaggcgttcgctctcccctccccgcctctccaccctactttcatctccctccaggcaaagagagtaaagctgaggctatcccgggacgcctcgctccaaccctgccgatttccttccagttgctcgctggggcaaccggctaggctggaggaagggcgaggacggtgtcaccccaaacggggagtcaacttccctcccccagccgtcctcggtgcatccaccgaagagttgtcccgcgagccgcatccccggggcaaccgaactccgtcgggcaggcaccgagaggctcccgagcctgcctttgcccgggcaggagcgagctacacaccagctggccagaccctggggccgggcgccgcgggcggcggagccaccgccagtcacacacgggacaggaaaggatcccctccgtctcctccccgccgcccacccgcatcccggcgccgcggagccccgctgtcaatcacagagccaagctccggctgtgcggatgggtcattctttggcggggggctctcagccacgtaacttccacattttcccgaagtcagaggaagtgggtgacgggacggtgggggactctcacctcggcaacaccggcttcctcggaaagcagctgcgactgctcctccgctcctttgtcagcgtctctaggctgcactgcctgctgggataccggaggactcaaatgccacctctctccgccctagaggatgagccgcggctcgggggtgggaggcgagaggaagaagaggtggggctgggggcggggccggagcctggggcggggcttcggccttgccacctggcctcttggggtttct

SEQ ID NO: 71176 - DNA, 1748 bp, Homo sapiens
tctgttgcccaggctggagtgcaatggcactatctcagctcactgcaacctccgtctcctgggttcaaacaattctcctgcctcagcctcccaagtagctgggattacaggtgtccgccaccatgcccagctaagtttttgtaattttagtaaagatggggttttgccatgttgcccaggctggtctcgaactcccgacctcacgtgatcgacccgactcagcctcccaaagtgctgggattataggtgtgagccaccacacctggctgcaaggaccactttctaggcaagaaaaccaataaaagaagaaattctgagaagacaacactggctaagtagggaaggctctgttaccagaaggctctattgtagaagggcccagatgccagaaaatggccctgagccagggagccaatgtcactctggaaacaggtcagtagtgtgaagggagaggctctttcagatgtccctggcatgaatattgtggcaagcagaataatggagccccaaagatacccattttgtaactcccagcatctgtgaatatgttacatggcaaggaggtgtaagctaaaagaatccaaagtccctccaccgactgaagggactccttcttggccaaggagacctctcacaaaaaccttaaagactgaattcctggccatgacaagaagtgagattgaacgtgcctcattatacccccacccctttggagcttaggcacaactgaccagcattaaggttaaaatagagatcataacactgacaaaacagactctttatgactaagatacccaattataaacaagacctaaggctatgcaagtcaaaggttaaattgcagttgccagtcattgatcttgtgacatagcatccttatcttaaaacattcctttctgttgactcccaagttttagacagagctttactcctttaaccaactgcaagttaaagaatctcggaggccacctatgacctgtaaacccccacttcaaaatatccagctttttttggccaaaccaatgtataaactctatgtactgatttatgactttgcctgtaacttctacttccctgaaatatatgaaacagagttgtgacctaactgcctcatgaccacttactcaaggcttcttggatttgtgtttcttcctgggccccaatcactcatgttggcttagaataagtctctttaaaatattttagagtttgtttttttgttaactgaagaattaagtttgtaggtggaattaaggttgctgatcagctgactttgagatggagcgattatcctggattatccaggtaggcccaatataatcataaggatccttataaataaacaaaggaggcagggaaatttgtgtcagagtgatttgatatgagaaacgctcaacctatgcctttgaagatagagaaagtgggtcagtcatgagtcatgtggtgacctctagaagctagacaaagccaggaaacggattctcttctgcagcctccacaagggaatgaaggctggcatctaaactcaatcagcaaaataaattcaataaggaagatttgaagatcaaagaccttcctctctctggcttcacatttctcatcactaggtcagtgatgttcaaatcatttttaggtgatagttttatgtgtcaactgactgggccatggagtcaagagggtttggtcaagcattattctaggtgtgtctgtaaaggtaggtaggtgtgtgtgtgtgtgtgtgtgtgtgt

SEQ ID NO: 71177 - DNA, 1111 bp, Homo sapiens
ggagggcgcctgtggagaccctagcggtggccactggcacagcgaactcttcccagagcacccgcccccaggcccaagggtctcccggcctagaagtcctcgtcctcctcccatccaaagacccgcttcatctcggccaggaagccccggtaatcattgagcagggggctctccttcctgatgtaggggatcacccactgcagggctggccccgtgaggcgggtgatgaggaacgtcaccttcagggcgtcgttggagaacgtgttctcgtccacgaacatgtaggagctcgtctgcacgatgaactccgggagtcggtcggtatctccgtcaaacgtctcgggaaagggaatcgggttcctccagcgacgcgccgcgggccggaggggcccggccaggagggccttcatcagctgcacccgaccgtccatcgtgccgcgcgcgctccgcggagtttcgctgggttgcgtgggggtcagcgctaaggcgtcgccggaagcgcatgtcgagggtgggggcccgggccgggacgggctgtgggcggagccatgggggagagcccaggcgcttgcgcgagctccgcccacaaagacttgtggtcactagtgcgctggtgcgtcacagggcgcggaagggcaatgccaggagttctggggtgggtctcatactgtggaggaggccgtgtagcctcagaggagtagggcggagattatgcgaggcgcgccagtggggctctcaggacagcaggcggtgtgcggggaggctgagcctgttgcccctggagagcagaagatccatgttctggagatcgatgcggcctcctgccgcactcctgacccctcactctttagtccttggacattgctttcagaaccctgggctctggacgccacttgagtagagttctgtgaacacatttttttttgcttcttcgtatatgtctcagtcagattatttgctccctgctttgcaacattaatgggaaaatcccaaatattagcaaatataatccagagcagcatattcaaagtgtaatgtgccataagcagttaatgaaaggtgggttaaattctaagaaatctcttaatttgctatattaagacaccaaaag

SEQ ID NO: 71178 - DNA, 601 bp, Homo sapiens
tccaaagtaatggagagacattgtcttattatgtgtggatacctgttaaattaataataaatgctgcaacaattatgtgcagtatacaattatactttaaaacagaggatgctgctgttagtatactaactcttgtttgaattggacattacatcagtgcttcttagtgcactaataaaaatatagtttcttgcctcaggacacatacacctctgtgacaccagtaacactgtagtcagaggctgaaggtcagtgtgtcggtaggctattggatctcacagtgttgcaagtgacttaaggtcatgactcacctgagcaccattagtatcaccggcagcagggcttcaggcccagatgcccacgctctaacattaggagaaccagaattgaggtcatgcatggctgcaagcgtagttgtcttaggtctctgagaatacggtacatgctgtgttagcccagctgaggttctcaacagcagatgctagcagaaatctcagggacaaaaatggaatgtcctttcctgagtgaaaacaagcaattccatagccaaggacctgaccatcggccatggtgtagagaccagcttaagactcaggagccc

SEQ ID NO: 71179 - DNA, 1671 bp, Homo sapiens
ggaggctgggcctccttgaggaagatggcagataaaacctctctctcactcacctattccctcagtttcacaagctctctcttttaaaagtcatacatatactttaaaagagttacagcttcttcacagctcgcccgttgcagcttctgcaccctgctgtggatgtcctgggacaggatagtcaggaactcctccaacaccagcaactccagaatctgctccatggagcgcatctcaggccaaagtcacccatggcgaaactcccatggcgaaacacccatggcgaaactgctggtgtcccgggcaccagcagcctcttggaagcagaaccctcagaagcacaggtgggaggccgccaagctagaccttgggtcgggcgggagcagcaggagttctggctccgggcgtaggaacttccatagtttccctctcacaggaggggaaccttttccgctcgcgggagcccaggccagacgccacagtcaggcttccagaccaccttggccccgaaaccagttgtgcccgccggccaaggcgcccggggccaggagagagagatgatggcttcagcaggagtccggcgtgctccggtttcaagttccagccggtgagcccaactttggacccggcagagctgtctccagtagcttcgcctcactgggcttgggacgctgcagctcctgtccccgtttcgcttctaccaggacctccgggaggcacaaaagcaggcagctttctcctgtctgtgttggacccacgcaggactaggcccccggtccacacgcagaaagtcctagcacggaagtttggcgtccacagaccaatttgtcagcttaggaccaacgttagggctgcgtttcccgaacgacaccattgtatcaagcggccattggatcaggtctagccacaattcgcagctgaccaatcagaaaagaaaatttggctccaggacgggaccagcgagggaccaattgaaagacaagaggcggggcccgcaggcaaaccttaaccccagagacctccgtggctgttgaaggcagagggtaatgggcgggttcgctagatcgaagcttaggtcttgaagatggggatactaaaaagcaaatccaaagccactgtgaactgcaggcggacgaccggagtcaaaatctccaggatggtttattaaaatgcgaatccccgggttcctgtgagattcaatgcgtcagggtagcgggtggagccccgaaatacgactttttaacaagctctccctacaaattctccccacacagccaggtttaagaatcactgaccgggtcgtaacagatttaaaggtggtccccacccgctccagttactccaaggctcaaggagaagcgctcatttggatcacgacccggggttcgccccacccaacaccctgcgactaagaagcgcttaaacaggaaacgggagcccttccaaaacagcttgaggctggttggaagccaggaagagtcccagcccctcccacgtcagcatccctgtgggcgcacagcccggcgggcggcgtgtggcctgccgggagatgtagtccgtagcgcagtcccgcgcctgcgccctgggcagttgccggtgagcttgggagaaccgtgggcgctgaggcggtgagtccccgagcggccagagggcgtggccgttccctggggc

SEQ ID NO: 71180 - DNA, 1547 bp, Homo sapiens
agttaaataaagcttttgaaaaagaccagtcccaaattttagttaaataataaaaggacattaaataacaattgttttgtataacaaaattccaaactgtattctttggcaactgactggagaggctgaatagcatctactgtcataaaacccacaagcactcagtcagatgattcatttccctacctgtcatttttaagaaaatgtatgaaaaataaccaagaccagaatttaaacacccgaaacctacttacatattttctcctttttctttcccccaaaattaggcttagtggtttggaattttaaaagctcaaatcaagaatgactctccaaagaaatgtatctatggttccattaaattggaaactgacactgagctattgtcctctgtccattttcatccccttgccccaaaaaaccgataattgagaagaaattaccatactgaaagagtgagtgactcatccagattaccaaagggaatttgggttgctgcatcacaatggggaaaagaagactacttctggaactgaggagattcactggggcatcacttagcactcccaagtccagttctaaagttcagtggaaaactgatgcaactccatgatgacatcacctgcaaggactcagatcctttggcaatgaatgcttgagtcaccctgccaggtaaatattcaccaggaacttgagctgccagcatagattaaggagaacgtggaattgatgtcacaggaagaaaagtgagaatgctttctccctgtgattttcatgactattgaaaaagtactggtaatcattaaggttataatttgggttacaggtgggattatgattggtttgacatcaccccatgataatatgttgactgatgggcctttgtatcttccttatgttgtgaagagtgtttttccatctgagtaaatggcaacagtagatgagttttagcaattgacagtaggaatgaagtgtgttggttatttttgttttgtccacctagatatatcctgtaaccttttctgcaagctatgtgccctaggagactgaggcttgtagactacattacctgggcttccttgccttcagctaatagttgggtttggccagtggtaggcaactgcaagaaatccaagagtgggaggagagaggccaacctcaccacaagcgttacttgtcactgtatctctggcagtggagttctcactctacaattacagctgttggttagtggtgttttttagtgctagccaataacactatttcttccccttgccactgaaattccaggtttcctaaaaatttcccattcttgctgatccaaacagcctatgtggtatcttctctctgcctacatatgcaagtggttcctttattagagtatgactacttgaactatctgattcaaattctgtttgctgttaggtcccaaattgatatggtagtatattttttaaatccttgtatagcagactcctgcgatggtcttcctgtatcccctcaggtctcacctctaaatctcaaggcaagttactaaaaacacccat

SEQ ID NO: 71181 - DNA, 1280 bp, Homo sapiens
cacacagatgtagcggtaatgcaagtttttaacaaccagtcctttagactcccagtccagtgctctttctcctgtaccacagtgcctccctgaggcaatcggtcacttaactactcagtctctgcctggacagcccaagagtgcccaagatgttgtccacttggttgtcgtgggaccatgagcaaccagagtcctcaatctcacaactgtgcctgatctgccccatgctggatctgacatcacttgtcctggattcctggagactcctattctgaaccctctcccagacacctccttccaaccttcctgcaatttcaggtgccacactctctccaaattcaaactccgaaccttccactgggaactcctgcactgattttcttagtcaccccaaactgtaaggtctcaaaggaccattaatctgacactcggtccgatggtcccttagaagtgcgcccacacaccgcccctagggttccacaccgaagcggtccccgtgccccaggcacttacgctgcgcagcggaaaaggcggcgtgggctagggcaaagagaccgatgcccaccagccccttccacagcgacggcgccatgatgccgaaggagcagcagcccagcaaaagaagcgaaggacggcggagctgtttcttcttccaccggcgggtgtccgcgcgccgcagaaagatgacgtcactgaagtcctgagcgcaaagtgtctcagtggtggaaaagccagagggctgtgagaaaacggaaacaggaatgccgggaagaagcagaaagctacacggaaaaaggtccgcgagaacccacgaacctgcgctatggaggcctctctaggagggccggagcccaacggagtcataaacgaagaggcgaaagcgggagctacggggaagcgaagaggaagggcgccggcaaatgggggcagggccagtggcgagaacagggtggggcagagggacgggggcctgcgtagagaacgtgtgggggcgaggggcggggtaggcagacgggcggggtggggaagacgcgcggggcccgcacgagggtgggtgtagccgaggggcggggccagtgggtgggtgggtgggcgtagccggggggggggggccctggtgggtgcggtcgagtggcggggcctgcggggaggatgggtggggccgaggggcggggaggaggtggggccgaggggcggggaggaggtggggccgaggggcggggaggaggtggggccgagggcggggcctacgggaggatgggtggggcgtagggggcggg

SEQ ID NO: 71182 - DNA, 769 bp, Homo sapiens
ataaataaataaataaattccagtgtttgtttttcagaatgagtgaaataagagatgtgtttctccttgagtgatgtaacttgtggcacgagcccctgaaaaggggaagtatgaggttccaggagagctgcccagtacctccaatgctatgtctagttgcacaatagtcagtagataggtcagtgggagcagtgggttgggacttcgcttgccacccttgaaacatcatgccatctttgcagtggagtcccagatttggcaaattccctgccctacaacccagtgggccctcttttgacccttgcatttgtggtatcattagcaacagtgacagttggtgaacttatgccaactctgagccaatatccaggtcagagtttgattgctttgggccaaaggctattattgcatggcttgtagaagcataggcccaatgccagaacttccatgcacttactcagtatggccagctctacagtaaacgtgtgtgaaaagattcggtttttataggcattaatgtaaatagtttctttatattggacctgggtaactatgatgggcaattacaagtacccattgctttcctgagttggctatgagaacagaacattctgtggtacgtggtagtgggggtgaggggaggatcaggtctaagagggacattgcagctgcaaagggaaagaaaaaaactgagaagccatcaaggattagaaggcaaatgggagccatcactcaagcactgtgtatcttgaagtggttgtctgtcagg

SEQ ID NO: 71183 - DNA, 1799 bp, Homo sapiens
aatgtgaaaaaaatagttcatttattcaataaatagttttgattgagtagattatgatacatctatgcagtggaatttcatgaatctgttaattataattttcacacttacattagcaatatgaaagaatttgtataatacagtcttactaaaaaatgcaggatgcaaaattgtatatatgctgtgattgtaacttgcaaagtgatatgtacctgtggacaagaactagaaggcacaaggaaaaaatgtaagtatcactttatttgaagttgtattcatgttgtgatgttgtttgtacattttgctattacttagatgttgagaatcttccacttttatgtacttaactccatatcacaagccggatattctaatctatcacagagtgcttagtaagtaaccaagaaacatgaggactcctgtctagagcctaaacatggggttccagtgctctagttccttctcgcttgttgtgtttcatcatccagagcccccatttctctttcttccgtatttggtggttggtagaggcatcttggtatataccacatgacaccaagtataaatatttgtttcagagcttttaatgaatgtctagcagtgccaggcagggaatgaattttcatgtttaaaggtccagtgtccacttaaggaacatcttaatggagctacagctcaagagcaagcccatttcatcttctgatttccattagataagcaacaaaaattggctttaaggtcatgagcctccttacagcagtccctctcaccttcagctgtattccctatttcagatatacttgtttctctgctgtaagtacacttttcttttctaattaggtcagttacttcatgtctgtttttcttttttgacatggtttcttctggctttggcaccacatattttccccatatgtcattgcctctggagcttcatgttgcaatagtttttcaaggggaacggagagcacattgctaagggtgggggatggcttttgcctcttttgcctgccctttgcttcagtgagtgttcgtatttctgttgggcctagttctgtttggttttgtagtcttcagagtcagttatgtttggactgaaagatacttaagtaaaaataatggcaagtcagagatatgtctggcaaaggtgcagcacatttgttaaggttactggtttatttatctcccttgtctctatggtgactaaatctgggtctgggatttaatggacttagttttgacctcttgtaacatctcctaacttttcccagcctctgatttagaaagaattcattttcacttgaggagagaaactgtctcacttagaaaaggggtcctaactggactctcgaaaagtggaatctctagtctttgattcttacacagtcttcaaccagagtacccattgtggttgtaaagaaagctaagaagtcatgtagaaatacacacacacacacacacacacacacacacacataatgtctcaaggaaatacttttctttttagtgaaataaagtattatttagttaatgtgaatgaactgtctgtaaagagaaccttttgtcagaataccaaatcaatggaaccattgactggacattatgtttttattttttaaaagtatctcctttacccattacaggattataaatttgcacacatataaatgtttgaaccatatttcagagttcaagtgtattaaattgtgccatggaagtccacaataaagattgggtttgaccaggattctcatggaagaagtcagatttggacagctaagttcaaatctagtgttcca

SEQ ID NO: 71184 - DNA, 1843 bp, Homo sapiens
ctgatatgaaagagagggaattcctatcatggggattgccagtcttttcacaaagacctgccactagattttgtagtatatgataaatgtgtgtgtgtttattgtgaaaattgtgtgagtcatatgaaaaattaagtctacttgaaaaatcaaaagacattacctacttgggtacaaagcctgatttatatatatatttctttaatgaccatattatgttatgttaaagtttgtatagtacttggacatatattatttaatttcattcctaaaacaattcaatagggaaagcaagacagatattaatattcccatttcatagatgaggaagaaaaaataacttggcttgtaagcaattcagcagagtcagagattgcatttgagatttttgattctaagtctagtgtgctttccttgggttacaacacaataaagtcaaaaacatttactgttattttcattaattgaaagcttaaaatcaatttaaaattctaacagtataaaatttaacagtataaaaatattgttaatttaattttatgacgttaatttttaaattgatttttgaatttgctaaaagtgttttaaaatcagtatcctgtttcacaattcctgaattaatctcttctctgtacatttcctgttccagtatgataatttatataggctttagcatttacttatggtattaaatgagtagacagttggaagggaattaaaattaattaggtcttgcagttcttataatactcctggtttgccacactgaattgccatgacgtggctggggatccctgttttaacatctaacaaagatagctgccagtgtacttaattttaaaacggtctcatctattaagctgctttataaacatcagccccttttctgaagtccgaagttagttttttaaaatattcactgataatggagtgggggtgctggtgacgtttctctttcttgtttatctgtaaagacagggaggtgcaatctaagttaggaaattggtgacaaatagtcatagaacatgggtcacctggcttcaattagttatgtgacctttaagaaaacaagtgcccgtttcagaaaagactgacctttgaggctagagacatcaagctactcctctacttttaggaaaaaacaatgacagggttaatttaaaactctgatgcagacagagttgaaaaatccatgacagatttatataacgaacgtggatggtgttttgttttcccagaatgcagttttaaggtcagacctatgactcagagctgtgcacttccctggtggtatgcatcagtgacatgttgccagtctaatcgtccagaagggcttgtgcccagctcggcttgctccattataatccccagctgagaagccacctttcattttttttaaatagataaggaagacagcatgaacatttgaaactcaaatactatatgtagtttataacttttcagcctgaagacttgatgcacactaagttgcctctttaattttgagaagtataatctccattgccactaatccatcatggtgtggcactgcatgaggatatgttgtgtgcattgtcagtatcggcgttttgctgagtttactgttttttagttcattggcaaggcatcgtgggttttggtgcaaagagcatggatttggaatcaaaagccacttcctctctgggtggctgattagctgagggtaaccttcatatagctggcatgggatttccagatggcatcctctctgcatgaacaaaaacaatgtgccatttcagtaaactttggtgggtgctccctcatccactccagatcttttcatctctttccttttattccctcc

SEQ ID NO: 71185 - DNA, 613 bp, Homo sapiens
ggaagaccctctgcagctcaagactggacaggtgacctagacctattgggtatttatttcattagaggatcaatagagcagagatttgttctccccaggtctccatcatctgttcataaaccctcctgacccatgttgagtccacagctgtctccactgggctgtcaagctgctgaggccaattcctctgagtccctaggactttgagttttgctctctgctgccccagtcattctcaggcccatggtccttgcagctgggctcttggccaacatcctgagcccttatctcttttccacatattccctgtgaattagtaaacttgataaattctatttgtaggaatctgctgcttgggtcggccacatttttagcgtgtagttgaattaataatatatagtgcttactgtgtgccagccactgctctaaatgttgcaaatatttactgctgtatttctcacaatgacccttttacataggtactattatcatccccattttacagatgggcaaatttagtcacagagaagttaagtgaaacttgccaatgtcatacaaccagtaagtgatagaggcaggattcgaatttagatattctggcttcagtctgtgc

SEQ ID NO: 71186 - DNA, 1256 bp, Homo sapiens
gactccagcattaaccattaactgtggctgagataacttgactggactcttgctgctgcatgagagaatctgcaaaatgtgtcatctacacacacaactgtcccttagtctcagggtctgtgacccagcttaacctctgttgatgaatataaagtcaagggataacaaaccccctttaccatacatagcattcctaaggtttacattgtcatgagtaaagatcccttgctaatacggtacaaggaatagtgccttcggagtccagacactcagcttctagacctggagcagctgttaactcagggaagcaggtgatctctccatctctgggcctcagcttttccatctataaaatgaggtgattggattaggtggtatctaagaccatttccaactctatcatgccatttttatgaagctggagacaccctcagacctggcccactttatcttcaggtccgccaatcctctccaacttgtggaggagcctatactctgtccttaccatgcacaggttgacgaacagggaagacaagctgccattgagggtggtaatctaatggcagaccacacaccaacaggatcactctggttctgcagctgagttttcacaaaacagtgcctgtcctggcacaacagaagagctccttccacagaaagttattcctatttgctctctcagatacgaatcactgtgggccaccgcgctcctctgtccacctgtggttactcctgcattgaatctgaatcaagacactgctcaggcagtcaaatgttggccttcggggaaacttggcagatgggagccaagtgagctttcactttatgtactttcagtcctctggaaatctggatttcccctgctatcaaaatagacaatgctattgcctaacaaaatatagacttcctgagtgacatccaggtcacggcttgatctctttcctcctgctgtgttcatgcttccacttccgtgcaccatgttaggttcagatgatctactgaccaaaccccagagaaccactcatgagtcttttcaacctttaccttgaattctagggctatcttctatttggggtttgaaaacaccagtgcataataaagtaatgtattaattatagttttttggtaaataaagatagatcgtatgttactagccttgatgtttcacacaatgaagcagagctcatgaattattataacatccctgatcaaggcagttgatctcagttatcagcattaagaataaaggtatggat

SEQ ID NO: 71187 - DNA, 1290 bp, Homo sapiens
gcaatgtgctgtcaaattgtataagattaacggttttcgaggagggaaaaacgttttggcgatgggactagttgaggaaaaagcactctgaagtgctgattcccgttcagttcagcctagagactgcaagatgtcccacagaagatgacatcttgttgaagtcatgtgctacagcaggcaaatcaggagatgcaaagagccaagtttcatcccaacttttaaagcaacttttaagcatccccaccctcacccagcttcctccctggaccttgaccgggagggtgcaggaggtaagcctttgggagaggcaaggactgcgacagtaaaagcgcctaaactcgcccacgacccgggctgggggataactcaaactttccgtgcctggaaaggctgcctggcggcggaggcggcgccggcgcgcggagtccctgcgggcgcccgcacatcccaggcagctgtgcgttcgttggggcggttgcgcgggcggccaccgccccccaagggcagatggggcacggggcggtccgcggggtccggcttccagccgcccccgccccgcccgtcgaagcagagcccgtgagttgcctcgcgccgcgtccgcggggctcagaccgttggcagcggcagttcgaccgttggcggcgggactcaggcggctcgcggcgtcggctgacaatttcaaccccccgcccccgcccctgtcccatcccagggcactccggcgggggtgaggggaggaccagatagcacgaggcgactccagggaaaagttttgtggcgcccgctgcgccgctccgacggcccggggactgcgggaaccctgcctcccacgcgggcccgaaccacccccgggagccacccgcccgctcacccatccgtgcccgcagctctctcaaggatgggctgccgccagcgccagctgcggcgccgtccgccatcatcggagtcgggaccggaggcggtggtggctctccgcatacattgcgcaggcgtcggcgcggcctccgcttgggtcgtggccgggctgccggtgggcggggcggggcggggcggggcggggcggggcccgaagggccaccgcgcccgcctcggacctgcgaaccgggcaggattgccccttgcgtcccacgtcctgaccggctgggcagcgactacctggtctaaagaaaccctctcctatgttccgtgctctgcccctactgcattgtgaggactagccaatcagcacccagcttggcccccccaacattcctttcttcacctttacctagcaacacagtaacattcctt

SEQ ID NO: 71188 - DNA, 1036 bp, Homo sapiens
acttggattttgcttttctttagtttccagatgttactgttgagaacatatcaaggatgtcagaactaggaacaactgtcaaggccacctactttagtccttttactttcctccgaggctcagagagaggtgttgactcaacttcctgtggctggaaccgaagtctcctgacaccctatctaatgaatgttctttcctctacgcacacgtgaaaggctgcctaaacaatcttttgggaggaaaaaaaaaaaagtgagaattgctgatccaatgctgggaaccattatgtaatccagctggaatttggcctatatcctcccaatgaaactgaaaaggggataggagggaattaaatggagatgttgcaaagttttgaaagatgtactgtttgacaacttgttctttttgtaaaggttcctgtgaattggcctttacctgctgttccagactcattcctcactactttctcccaggaactcttttttgcacaggtgaaaccaggacgtctcctgagcctacaagggcctctgctttgatctttgctcttcccccacctcaccgaggcatgattcaaattcaggataatctgattccagagctcgcaagctttccatcagtaggaggagtcagaggaagagagggccactaaaaatgttgcctgggagcctatgccaaaggccaaacgagcagccacatcaaatttccatctgaatctgggagttaggatgggaatgggggaaatggccaagctctagtgtacctgagtggcttcatggaagaaatggctatttcttgaatggtgagtttttttatatgttgtcctcagagcttaggacaaggcagggaatcgcatcacaatacagggaggtgagcgacacatcaccaacagggaggtgcaacagggatgctgatggcattttaccacaatgcccttctttaatactgtgtagaaggtttgtgttcaataagttttgttgttgatcatgatgacatttattattatgcctggggataattaattcaactgaaacatact

SEQ ID NO: 71189 - DNA, 1469 bp, Homo sapiens
cttgtcaactcctgggtcgccagagcctcacgcagtgccctgcacttagtaggggctcaataaatacctgcccaacttaaaaatatggaccttttccttttcagcaatgagtgtaattcctgaaaacaaagttctgtttagaacaaaaagtatgctgtgtctttctaaaagaatgacaaagaagcggagtttcccggccaataaagctggtgtttacactgggatgtttacatttatgcttaagtttcaagttcgaagctcgagcgccactgaaatctgcagtacaagaggcaggcaactgctgccctttccatccttcccacggagtcgaactccagccagaggaaggtatgagaccgataaaggagaaggctgacaccagaaaaagaaagttggcccttctacccctcattcgttcattcattcgctcattccgcattagacaccagagccggtgccaggagtttaggctaccaagatgaacaagatccggtgtctatccccgggtgtcgtaaagaaacaagtaaaagacgcggttcctgagcgggggaggggcctttgggcgaaggaggcgcgtcgttttctcgaagccagagaaatttgtcctgtccgccccacccactcccctaagatggcgccctcgcgaaacccgcccggccacccccgcgagggaatattcccacgccttccttccgtttccctcccgggccggccgatccgccggggaccccgcggagctcaaggcccttgaggcgccgcgggatcccagtggccctcgccccgccccaaacccgaccccggtgggcgtcgacgcgcagcagcagcgggtccccccaaccccggcgccccgcctccccgggcctcgcgccgcatgccggcgtcggcgctttttgacgccatagtgggcgtgtcggcgcgacccgcgacgtcgccacgcgccgacaatggcggctgcgtcggcctgagcagggcttagtttagaagtaatttcctgacgttgccgagggagccgcagtcgcctcagatccggtcggcggcggcggcggtggcggcggcggcagcgcgcctgcgcgctcccgcagcgccctggacctagcggcggtgccgaggcccggcggagcaagccaggtgggcggcggcgcggccgagctcacagcatcagcgcgcgcgcgcggtgggcgggcagagaggggggcggtgcagccgccgagcggccgcgatttcccggggactgctggggcgcagcggggaggcgggccggggggcggcggggcgcgagcagagcgcggttgacctccctttctctgctcagctccagcgtcatttcggcctcttagttcttctgaaccctgctcctgagctaggtaggaaacatgagcggcaccaacttggatgggaacgatgagtttgatgagcagttgcgaatgcaagaattgtacggagacggcaaggatggtgacacccagacc

SEQ ID NO: 71190 - DNA, 1132 bp, Homo sapiens
cttgaacctgggaagcagaggttgcagtgagccgagatctcaccactgcactccagcctgggggtggagtgtattgtatatgctatataatatatatattatatattatacatatatatatatatatatatatagaataccaggggagtattcccaagagaatatttttttgctgactaagaaagaaagggaagaagaccaaaacaaacattaccagtaactctgagagaataaaaaactgccagttcctctgctgtaatgccatcctgaatcacaagctggaaaacccctattctaaagtgaaacctttagccaaccaacttccctggttgttgctctctcagagcagtgagaacttaagttggggccttacctgaacttgactgggggcttatctggccccttcacgatcagataatagtcagtctggtttgctcaaatcactttggggccgacaagatagtgagaagtaatggaaacttactatcactgcattctgaattcatttaggaacagtacaggtctgactcaggtctctcacctccttggccctgactcttttccaaggaactcaaacaaaccagtaagaaaaaaaaacaaataatcccatcaaaaagcaggcaaatgacatgaacacacacttcttaaaagaagacttacaaatggccaaccaacatatgaagaaatgctcagtatcactaatcatcagagaaatgcaaattaaaaccatgagataccacctccgcccagccagaatggccattattaaaaagtaaaaaataatagatgttggtgtggatgtggtgaaaagggaacacttacacactgctggtgggaatgttagtacattagtactaacattagtacagcctctttggaaagcactacagagttttctcaaagctaaaagtagatctaccattccatccagcaatctcactactgagtatttagccaaaggaaaagaactcattaaatcctcttattgtttcttgatcactaatcagtccctctccttcatttaaaatcttaccgtctcccctcccagagttaccacttcagtttccatctcctctgcctgtcacttccagaaaacagaaagcatgtttcacttggcagcagggggcacagt

SEQ ID NO: 71191 - DNA, 651 bp, Homo sapiens
ctgctgctaagatttgggtaatagtttgcctttgccatcctactaccttttccttaacttgggtttggatagtcagtgagagagctaaaataaaggtggttagagccagagggcaatttttatatgaccttggatccatgccaataaacttttagaatgtctgaacaagtcactgatggaaatcaatgaggtactcacctgtcttatgagtaaacagctgcaatatcttccagtttctctttacaagaaaggtttcaaggaacctctatcctcagattatccatatttgtgagggatggtggatagtcagcttctcttgaccaccatacccctgatgtggtaatcttctggacactaacatccttgctccatcaaaggatcaaagtctgctcattgcaaaattccatgcagtagctggtgcacatctccacacatggagctgtaaactgaaaacatgctgcatagtagtactgcaaatttctggggcacagggaagagaagcctttaaatgagtgagaaaaggatctgaaccacccaagagtcctgggtagctactcaatggcatcagttttgctggctatccaaataggaaggtctggttttcctcacattgagacaataaaaatgtaaattacacaacacttcagttcc

SEQ ID NO: 71192 - DNA, 1106 bp, Homo sapiens
ctatttgatttatcacatatctgtccatccctgtatcattcaatccaatccattgtgcatgttcctgtgtcctatatttcctgcaaattggcagctggatccagtggcttgatcagattcaggtttggcttctttgagaaggtgaggtggcagttgtgttctttcatcaggaggcacatgattttttttgtctctcttttttgttgtgatacctgggttcattcattcattaggggctgcagcatgctgaaagaaaacagaagcctgtggagtgagccaagatcaaccaggaaataaaccctttcccttgcgatgtctctccagcgccctctactgacaaacctgctttagtgccagtttgtagaggtaaactatttaaagggtctgaattattttcatggggggcaaaactcatgaatttggagctgagaggcaatatatcaataacagacacaccttacacgcatgtacggaccagataaggaaaactctacatatttccagaaacttatctgtgtgcagctctgttctctctggtcctctgctccatgaattctagtgcctttggcctccctggactttgaactttgttttctcaaccctaggagactgcagggctgtgcatggataccttttccctgtgtcacagcctggaaattttatctaggaagtaagctggaggcaatagtagggcttatcttatttgttccccttccctaggtgatcactcttatatttcttgtccaatgtttggaaactgttgctttacatattttactcatttttaaagttgtgtaagtaggagggtaaatctggtctttgttattctaccatgtcttgggccaagaaggaagtcccacctccttattttcttttttaagaaacatatttttatttatttatttatttatttattgagatggaatttcgctcttgtcgcccaggctggagtgcattggcacaatctcagctcactgcaacctctgcctcccaggttcaagtgattctcctgactctgcctccagagtagctgggactacaggcacctgccaccatgcatggctaatttttgtatttttggtagagatggggtttcgccatgttgg

SEQ ID NO: 71193 - DNA, 366 bp, Homo sapiens
gttcctggtattagaacactggcttttccgtgagaggaccataggccaccgatcacatctgtcttggctctcatcagtctactctgcgttccagcacagtactattgtgttgtagtaatcagcatcctttttccattttcattctgtgatgggaacgcaatgtgagctcatctcaagtacttgcaaaattttggtcattacctcatggcagataatagctcccagttactcaatatttacccttcacctagtacctgacctctccctgctcatttaatgactgctgtgagatagatgctctcatcgttagccttgttttatgaatggggaaccaaggatcagaatggagtaatggtttacatagag

SEQ ID NO: 71194 - DNA, 341 bp, Homo sapiens
gtatttaaagccatttcctaaaacaacaacaacaaaatctgaaacttgatttgtcccaagattttcactcttggttgagatagtgccaggacatagtgaaaccaggcatagtctggcctcctgctggcattgccaaagctgctagtaagggtttatttatggaaacaaggccaaagatcaactgacccagaacaagccctaagtcaaatgatttctccctgtattcataagctaaaactaagacaacacaaatattgcttcatattccatgaattgcaaatcctcagctttttaaatttaattttcatatgttagagtttatttattttaacttttatttt

SEQ ID NO: 71195 - DNA, 598 bp, Homo sapiens
caattagtggagtaagggaagaaaaaatgtgctctcctagccagcagagctctgtcttgaaacagcaaagtacaaattgcccccaaatatatgctgtcaccaaacattcatgccctctggctggcctcctgagcaatctcctgaggataacctttgttcccagcttcctttcagatagttgtctgcctcttctttaattgaggaagctgttgtttccaacagctggatgttggtgtgctcagccttcaggaagatcctacagatggggttggaactacctgacaaagcagagacttgtttctgaaaaaaagttccagatcctttcaaaacccaaaagccctcgctcagggagcagagtaagatgctgtagggacaagaagcagccaaaggaattgcacacatcacacattcttgcctcattccagcagcttcagagatcaatcagcagagatgaggtcacttttgaccactaaaataaatacctgaaaaactgactgtggaacagtgtggagccgggcagaggttactcacataacaggtgtttgacaaatagctgaggtcttgagatgaggtcatagagaagagatagcttgggtag

SEQ ID NO: 71196 - DNA, 1629 bp, Homo sapiens
acatacacacttaaagataattagccatgtctatgtattataatatgcagagaaaaaggactagaagcaaagcctcaaaaagttaacttggtagtggaaccttgggtgatattttcttctctacgcttttatgatgttccaaattgtctccggtaaacatgcattattttgtaatctgaaaaaaatcaatgtaataaaacataagcaatataaaaacacacacataaattcaaatctgcctgtgagcgtcctgctcaagatgcatcttcggtttttgagcagctaaagtcaaattagcattaacaagaagacagagaaagcaaagctcttgtgttggtcaagccctgacttcaaggctcttggccttctatgcctgcctttgaggtgtctagtgggtgggtcaggtgtacggaaagcaagaaagccttgataggtgtcgctaagggaggagggcgcgcctccctgagccccgcccggccaccaccagcgctgctctgaccgccaccatcttaacgctgcttccccacaggctgcaacgtgcccgcggtctagactgcgaggccgcgggctgcaccggagcgcgcagtatcttcccccggactgcgaccacccgcaccgccagccacggagccctggcccgggcccgcggttccctttgcgacgcctccccgtgagtcgactgggccgtgggtatcgaggacaagcaaacagaaacccccactgcccaccgccgctgccgccgccaggaaggcgctttgtcatgcccggagccggcgccgggcagctctttgccaagtttcaccttcggtgacacaacttttccgtgtttcttttttaggcagctgccacatcacgaggctaatgagcacactaaggtttgtaataaacctgcctgccagatacacaggaactgagggaggctggttgaccagacctttcagcgcgatcgtcggttcccagctagccgaaaaacaaatgttccccggaatgagagcatctaggagcaccttgtcctgtttccaagagaatggctcacattgttcccagagctccgaaaatcactcacaaattcaagagctcttggaagccttaatgttcaataaaccccccaaggggagaggcaagcatacacacagagaatcaaaggcaaaataagcaggtcaattctcaatactttcaaagtcaccattgaaagaagtttctgaaaatatctatgggcatattcaagaagtgcactcagcctgtcttctttaggttgtttacttctacttttaagagctagataaatattttaagaaccctagctatttactaaccctcaactccagaacagtaacaaatgctacctacattatttggagcaagttttgagaactgggtttcatgtttgttattaaatttacctatagccatgcaatagacccatcactgttaattattaccattgagcaacagttctacaatacagataaatactacatgattcccaacttcgagaactgtaattaatatgcttgttcaaggcgttgtgtctctgttaacaagatatatttttggaaatattatctaactgaaggcagcataaatagtatacaaaataaagcttgcacttttttatttttccattta

SEQ ID NO: 71197 - DNA, 1378 bp, Homo sapiens
gctacaaataattatgaagaggatttgggtataatgtgcactcattttctccacctatccccaagaacagaccaatatttctgattagagatctccctggtcacacctccttagcaaggctatgatcacctccttcagcacagaaaagaccgtgtggcttatgacactgtatgtaaaaccatgggaccatgatgtcagagtgaaaaaaacaagtccctacatgagtaatagacagatgatcactgttacttcttaataagaggtcaccaacctcataatttcttgtcggtaaaatacctctaaacatctgcttttgcctggcccaagtctgagaaagacacttgatgaaacctattatagtaaaccacaatgatcaagatgatcttttggaaggcattcaggactcaagcctagatatgctggctgcatgaccacagtgacctgtccttcttcagtaggataggatagaaagactattggaaagggccaggaagtgaacaaaaaacgaactgtggtgtaaatgcatggggccactactacccattacaacagcagctgtacaagtggctggcttcttgggctatgcatggaattgtcctccattgtccagcagccagcatgagcccagcctgacaacagtgctgtctcaccaagagaacccacagcccacagagccttgaaacttgcctggatatggtggctgttaagctaagcacaaaggaaagggttgttgaaaagaacacacccaactccaaacatgtagccacaaacctaaagacagttttgaaagcgagaattagctagcatttttacttaatccaaaaaagatttggttttatctatagcagcctacaagatttccgatgccacaggaaaactgttgcaacaaaccagaaacagccttaactgagtgcttttccaacagaagactgctgaaaagatcttatgtgacaaggtagagaagagtgagtcaaagctaagagaatatctgcttgaacaaacaaatattatgctttcttcttccctgaaatggaaacagatcctccggtccaagagccgcgtgactcaaactatatacacatctgccaattttaaagtttatacaaagcataaataaatacacaaaaggcgactggctgcacaagaggcctttttaatagtttcaaacagaatcaaggtccccgccccctttccaaacagaacagcctatcttgtctggctacatttttgaaaaggttatgaaaaagatcagtgtccatcactggtcttaacctcagtgagttgaagaaaatgtcatttaaaaagacaatcagcaatttatgtactcttaaggccatatttcattcagcagcacaaaataatttactggaaacctact

SEQ ID NO: 71198 - DNA, 893 bp, Homo sapiens
ttcttattggtatgtaacataagagagtatcttacatatgtggcatcttagattctataaggtacattaagttagtcctagtcagaaggctttaaagcatgaaattacggcaagctaattcaacctttttgattagggtgatcagattatattatattttttcccttcaggtcttggacccaggctgaagtattgttagactatacaagacacttccttctctaaaaacctcatagcttggaaaaagaggtggagatgaattgtaaacctcaacctgttggttttgtagtcttagatcattacaactggcaggaatcctaaagatcaatgtccatccacctttttgtgtacactgaaacactgaggcccagcttggcaaaaggtcttctcaaggttgctcagagagttagtggcagaatggatttgaaactgtggtatatatggcaggctgcctctctttttattccttccctctcaacttcacatttatctgcatatcatttttcaaaccattctaaaggcattcaccccaccttaatgggcagttagaatggagacagctacatatttttaaaagtcattaaattatgtttgtatttcaagtaatgtgattcccatttagaaatgagtaaatatgccaagataagccagagcctttttgcagaccaggttctccacctttcaggccccagccagatcactgctgatgagtaggggtggggcgggtgagctggcagcagcctttgttaactcttagcagtaacccaaatgtttaccagtcattgggttaggagatatggaatacagaaatactgcatatttcagtgaaaaaactagaaataatattcagtacgatgtgattatttaagtaaataaatgataataccccttta

SEQ ID NO: 71199 - DNA, 3100 bp, Homo sapiens
gagacaatatatttaatccacgtatctatgaaaggactcatatctagaatatataaacaaccttaagaatctgacagtaaaaaaaaaaaatcagactaactggaccactcatacattgctgatggaaatgtaaagtggtacagccattttggtaaacatcattgctctctgacaaagatacggtgggtcccactgatgaactgtgctgccacagtaaatgtagccactatgcctatctccattctgaagatgtgtcacttcctgtttcagactcaaatcagccacagtggcagaagcccacgaaatcagaggtgaaatttaataatgaccactgcccattctcttcacttgtcccaagaggccattggaaatagtccaaagacccattgagggagatggacattatttcccagaagtaaatacagctcagcttgtactttggtacaactaatcgaccttaccactttcacaatctgctagcaaaggttatgcagcgcgtgaacatgatcatggcagaatcaccaggcctcatcaccatctgccttttaggatatctactcagtgctgaatgtacaggtttgtttccttttttaaaatacattgagtatgcttgccttttagatatagaaatatctgatgctgtcttcttcactaaattttgattacatgatttgacagcaatattgaagagtctaacagccagcacgcaggttggtaagtactggttctttgttagctaggttttcttcttcttcatttttaaaactaaatagatcgacaatgcttatgatgcatttatgtttaataaacactgttcagttcatgatttggtcatgtaattcctgttagaaaacattcatctccttggtttaaaaaaattaaaagtgggaaaacaaagaaatagcagaatatagtgaaaaaaaataaccacattatttttgtttggacttaccactttgaaatcaaaatgggaaacaaaagcacaaacaatggccttatttacacaaaaagtctgattttaagatatatgacatttcaaggtttcagaagtatgtaatgaggtgtgtctctaattttttaaattatatatcttcaatttaaagttttagttaaaacataaagattaacctttcattagcaagctgttagttatcaccaaagcttttcatggattaggaaaaaatcattttgtctctatgtcaaacatcttggagttgatatttggggaaacacaatactcagttgagttccctaggggagaaaagcaagcttaagaattgacataaagagtaggaagttagctaatgcaacatatatcactttgttttttcacaactacagtgactttatgtatttcccagaggaaggcatacagggaagaaattatcccatttggacaaacagcatgttctcacaggaagcatttatcacacttacttgtcaactttctagaatcaaatctagtagctgacagtaccaggatcaggggtgccaaccctaagcacccccagaaagctgactggccctgtggttcccactccagacatgatgtcagctgtgaaatcagactgaaatgctgaaataacgataaaaaaaaatacagaggttaaactagcaaagtgagtaaagtcaagggataaagaaaatttgttggaaaactcacaaagcaggacataaagcaaggccattagatatatctcattagtgtgacatctgggaggacaaagcatccaaaccctttcttctatataagtggtgagatgatgaaggttgtaagagggcttctgcccccttgaagacttcagatgctggggaaaggatagataagaataaggatgaaccaggcttttggagcctgggaaataatgactagcgataaacctgaagggaagttaagtatacgatccccagataatactaaggagaaaggcaatgtgattctgcagccattgtagccagagataataagcccttgaggaaggggccaggggaatttttctaaggatagacagtattaatgcagcactctcttctgctattaaactctcattggcttctaaaaggagtttcggtgagtgatttgctgagatgttgcattttcatggctgctgcctttaggtattattgcaacagtttggaattttgaaattaaaacagttctgtaaaaccagtttagttttgtaaagtgtatgcatcaaagatgtccttcattcagacattactgagttacaactatggtgccaggtactgtgtcagggtactaggggtatggggataaaccagactccctctttgatctaaagcagcatgaggccaggtgagaggtttcaatataatgtgataaaatgtgcactaggtactaagggatcatagagaaaggaacacattaaatggggaaacaattgatagagagagaatattttcatctgggtcttaaaagatgagtaggcgttctctctctttaaatgtctgatataagggcattttatgcaaagaggatcactcgtgcaaagactcagatttgcaagaacgtgaggtatttcaggagttttgtatggttccatatggactatgacaagtgagacaggtaaactaggcagagctggtcatcagataatgaagtcattaacctaaggagattggacaataaaatgcaatatggaggtatcgaagtataaacataaggagtaccactgatggctgatttaggatgcccagtctggcaacacgctaatgaaatgatagtgggggagggggccgtaccaagactaggagagagcagtcctgagactattgcaattatctgcgggagacataaaggctagaacctgaacagtagcagtacaaaaaaagaggggagttcaaatgatattaaggaagtagaagtggtatgacttaaccatctgggtatggaaggggaaatggctagagtcttggggactttgtgtttgatgtgattatggaccacagaataatgtctaagagaactggctctttagtctgactgccagagtctgaatcctgaatgttttagtatgttaccttgggcaaagcccttagcctctatgaatctatcttcctcattcataaaaataagatg

SEQ ID NO: 71200 - DNA, 997 bp, Homo sapiens
gatttccaatttatcattaaaaatgctgatggtttagcattaaaaatgcagatgaggaacttgagactccaaataacttttaatgtgtctgaataacttttaatgtgtctgaatagcagcaaaaaagaaagagaaaaaggtaaaaataaagtagtagatatttaaagtaataataaagttagcagtcaactgctcaaagaaaacttaggaaaaactcttctggacattagcctaggcaaataactgatgacgaagacaaaaaagcaaatgcccgaaaaccaaaaataaacaaacgggacttaaattaaaaagctgcacagcgaaagaaataatcaacagagtaaacagacaatctatagaatggcagaaaatatttacaaattatgattctggcaaaagactaatatccagaatctataaggaactcaaacagtaagaaaaaaaatcaactccattaaaagctgggcaaagggcggggtgcagtgactcacttctgtaatcccggcactttcggaggctgaggcagggggattacttgaggccaggagtttgtgaccagcctggccaatatggtgaaaccccgtctctactaaaaataccaaaaaaaaaaaaaaaaaaattaattaattttttaaaaaaaacctttaaaatttttaaaggaaaaaaacacacaacagataaacatgatggaaactaaagatcctaaaattcatagcagagtacaatcaatgctccttttgctaaagaagggaatttccaagttttgcaccagctacaaaattctggtgatttccaaaatccctgcagagtacattaaagtttgtgaggctgtagaggccaaatttttctaaagaaagtatttgtgttcccaggagataaaaaaacaaaaagcattaggccgggtgcagtggttcacgcctgtaatcccagcactttggaaggccaaggcaggcggatcacgagaccatcctggctaacccagtgaaaccccatctct

SEQ ID NO: 71201 - DNA, 3681 bp, Homo sapiens
ctaactacagaaaaatcaaaatttgcagatgaaccctttcttccacatcattggcagaaataaaatcctattcccgccaccacctcttgcaattaaggaagttgctacaaatagcagcacggaacgtaaatggtcctgtttcgctccattcttaatgtaccctctaggagtaaacaggttactcaaaaaagtcagtagccagaaagcgattttccctatggctaactcccatgaaaatgaaattcccttttctggggattctgaagggggtaaacgtggacggaggagtccagtcacagtccgccttctcccatgggttcaaggtctggagtgctcagtcctccgcgaggcttcagaccagagatcggcagcacgggcagtggcggcgcagcctcctcgcggctgcacatccacccggcccaccctgacaatcacgctcgcctttcaaacaccctaaaggtgagctttgtaggctgggtctccaaagtttgcccggcctccggtcagaagccgcccgctggctgagccctaggcaaggctgagtcttgccctagtctccggctccctcagcccccagctcttcttttgggccaccgtgacaggtctaggtttacctccatgtgctcgtggcagaggaaacaaaagaaagcaacctccctgagaataaaacgccatcttcgactaattggcaaactgaggggtccccgggtcggtccccccacgagtcccccccaccacccagcccgaaggcggcccccagtttcaggcagagtttgtaacagctccgggaagccctggtcgaattgtcctgggggcgagggtgggataccccgagagccctacctgcctcccctccccggccgcctgggcaccgtgtttcggtgaaaaggaagaagaggggtggtggtgtctcccagagacgtaactgccccctcagaaaattgttgtgagggacccggcgaaggggctggcgagcaagcaaaccggcacgcgcggagccgcagcgagtgtacttacaaaacgattcaagctccggcggaacatcgcgtcgaaggctgccgggcgctgagctgggctctaccgggctgtctgggaaggcgccgtccacaaaacacactgcggcgtgggccggcggcgccaagcggagcagcgaggcgggcggccgggccacccgctcgccgcctgcccccctcggctctccgcgctcccccgccccccagccgcccgcagcctagccgccgccccgcctcactcgcggcccgcccccggcctgcctgacccgggggcggcggccccgcggatcgcccttatctggccccggcaccccgggccggcagctcgcgcagcacccactgagaaggcgagcccgccgcgcgggggaaggatggcggaggagcgcgaggctcctcctgtggggagggggcgcccccgtctctccgccagcgccgggctcggcaccccgcgggatgcgctcttccccgacgcggcaccaccgcccgcctccccgctggactccgcggccgcccccctcggggcacggggaaccctcccgaggcaccccgcgcctcacctcgcctcagcccgacactactcccctgtctctgtcgggagccacagcctccctcgccccggccctaactcgtccgccgtgccgcgccgcgccgtttcgctcgcagcccctcctcggtccgcggctgccgcgccgccccgcgctctggtcccgcactcgggccagggagcctgggtacagccaaccggcccgccctgagccagccgacggccagactccctcttccgggcgtggtggagccgggctctgaggcagggcaccgtgaagaccccagcgcgggaggggcggggcggggtgcgaggggggactagttctgaaagcccaccctcctcatctgcaccgacgagggttccccctcgaccctcgcgccgctgtactcccacctacgcggctttccctcctctcagtctttctctcgtcctgcctgcccacctaagccttcttacttccactttctctgaggttgtaaagtcaggctttgtgtcgttgctgctgcgcagcggggcgggatttccctgacccccaccccgccccacccaggcccctcccgctcgccccctccccctccttgctcccggggcagcctgggagttgtagtccaaccgtccccctacttcgcctggtaccgcgggctgggagctcccccacacgctagtcccgggtttgcccagagggttgaagaaggaagcgcgggctgaacagcgggttctccacgccggccggctgggtgtggaggccgggcgcactcggtagccttcctagcggtgggacatgtgagaaggctaaattaggcaaagctccgaatcctgggagctttccctggaacgcaaaatgtgcgcatcaggaaaccctctacaccctcggcccccagcttagagctggaatttgcgaaactttaaaaattacaaaagaaaagcgagtccagaattgccacgaggctgggcatccctcccaactaccacaaccccaccccttttcaccgccccttaaggcggggcccaaggctgttggagaagaacttgcagattcttctataaaagtcaaaaagaaggaaagggagttcagagactcttacacgagtcttccgcctcgccgcgttctcctgccagtttagagctggggacagggcccagccacaccacaggccttcccaaaggtcgcgaataggcctttactactaggcataggcgcttctcctttaccctccggagttcggattcatttcaacaaacctttgctgggaattttctttgtaccaggcactgtgccagggctggacacagcgatttcttaaaagacctccccaacagggtggtcgcaatctggttgggggatacaaacaagcgaaaatgccacgttagaatttaataatagctagagttcaaagtgctagagaaataggggagagcgacattgcatctgaaaatggggtttgggaagttttcctaaaagccctggagattaaactagcccttgaaacgtgggaaggctttagagggacctgactgagcccaaggggacaaagtccagggtagagggagaggtcggtgaaaaagcgcaggacaaactaagaaagagatcacgctgtagtggcagacgcccaggacgtgtaggtaagggcggctcgaacgaaagctaaaatctaaaactcttcaaaaacatgttacgaagtttgaacttcattctgcgatcaacgagaagcccatctcccaataaaatgcaaatgcaggagacctaaggtttgttcccaaactgtcctaactgccaagaagtaaaaccaaccgttttcaattcttcccctcttatgattccttctctgctcacagttgagcctgtatctaatgatttttaagatttatgttaaatttatatttatattaatcagatattatgatattttattgacaaaagagatctaaagttttgctctctactgctttaaagattttcaaatagagttattttctagctttctagctttaccttttttttttttttttttttgagacagtctcactctgtcacccaggctggagtgcagtggcgcgatcttggctcactgcagcctctgcctcctgggttcaagtgattctcgtgcctcagcctcccaa

SEQ ID NO: 71202 - DNA, 1096 bp, Homo sapiens
gatgggaaacatcatggaaggccaggtgtatgtgaggtggaatagaataggaattcagtttcatacaagttaagtttgaggtacttatgatgtgtttgtttcagtttatttttgcacaacaaatgaccccataaattagtggcttaaaacagtaatagcatttatgttgggtaaatgtctgctatttttagggtttatttggcttagcccatgtctgttccactatgttaaccagggtggctcaaagatggggaactggaatgatcagaaacatcactgactcacctgtctggtagtttatactagctgtttatactagtttccactcacctgtctatactacgtagtttatactagctatttatactagtttatactcacctgtctggtagtttatactagctgttcagaaaagaccttgcctgtaacggccagagcactttcaagtgacctgttcatgtagcctgggcttagtcacacatggtggctgggtacaaagggcaaatcaaacagagagatagagaaagaaaaatcataggctttttttttttatgacctagccttggaagttactcactgtgaattaggccacattcttttgtggaagaaatcacaaatacctgttcaagtttcaactaaagaagaaatagataccacctctgaatgggggtgtggcgaggttctagcagactgtgtgatattggacacactactgttagttacaattgttttgtaaaatataattcatcacaacattcaaatagagattatgaataggcagttagttgaatgtgtgtctgaagttcagggtagcagtatttccagagatataaaatagaaattatttaaccaaaatagatttaaataagtaagattaaataagattatctagagaactagtatggataggaaagaaaatcagtctaaggactgagtcttggatcattacaacatatagagatctggaaaatgcaggaaaaacagcaatgattgagccaaaacaatgaggaagggggaaaaataaacaagaaagtgtgatattttgaaggccaaacaaagaaagtattaagagcaggagttgtcagctgtataaaat

SEQ ID NO: 71203 - DNA, 1323 bp, Homo sapiens
cttcccacgtgatggcaaattctcattttcagagtcagacacggttgaacaatggaagcatgtgcttattgtgatgtgcgtaagtgaaatgacctcagcttcctctgtcatctctttggcttgatggaaataattcagctgtatggcatttatcacatttattgaaatcttaaagtcatcacgattgttttagaactcttcagttatcgtcatcagtagcagcatttacatagcatgttacaacccacaaagaactttgcagacctgctgtcatttgagtttcacaataatcttctgaatcacttgggcaggaagcatttccccatattatagaacaagaaactgaagttctgaaaggttaagacatttccctttatttaaaccagctagaagatagccaagctgaaaccagaacacaggtctcagacaccggatatctactacagtgccattcctattatgctgatttacctctcacacaacgtctgtagcaagattcctacattaggtccggccaagaaggacctctggagttaggtactgaaacagattttttaaattcttttctttttttaagtatgggatttagtcacaatcaaaaagtctttcagtcaataagtatttagtgagtcgccacaacagggaattgacactgttacgcaatgccttcagacagactttagactttgttaagtgtttaaaaattgactttcactgagtgaaaatcctttgtcttatatttgagcagaatattgatctgagtgaacaactttttggataatttaaatatagcaggattttatatcattcgtaagtcaggccagtttttctattggctgtcaatcttgagacagtgtgacattagatataaaatcagttagtgtgttgggagaaatatcttcttctgtccacacaaaaaatttctaccatcatactaggcttagatataaaataatgattcaggtctgtatattgtgaacaaataggtgaaaaacaactagaggtttctgagctgccacgtgttggcaaaccattggaatggcagatcttactatacacaagactcgaaggcaaaatgtatttgccaactccctgcctccatattcaggacctggatatgagattacactccatgagctaaactataaaactctaaaatatcctatgataggagagataggcagtctacagagacaccttaaagaaacaaaatgggtaatgaatgcaggcttctcagctttcactgtccatcagaatgaaagtgtatcagccataaactcaaataattatagccacattaattgaacacctgctatgtgccag

SEQ ID NO: 71204 - DNA, 1035 bp, Homo sapiens
gttgcagtgagccgagatcgtgccactgcactccagcctgggcgacagagcaagatcctgtttcaaaaaacaaacaaacaaacaacaacaacaacaaaagagagaggttggtgtgaattccccgagaaaactatccagtgtagatgcatctttcccctaaaccactgaaggtgactcagtttggctgttttctctgtgggtgtctaaaggaagatgtaacattctgtaacacttgtcttctgtcttcaggtatctgcacagcttcacagaagattatctggatctggagaagaggtgggtgtctctgggaaagaagcagagaggtgagtggcacagaggctgtggtgagtgaatctgagggtttgtatcatctcttaggcctgaacaccaatgccttcacctcaacacgtgaagggcgtgctcaccgagcagcggaggagaaagggcaaaggggagggtgaagtccaagttattgcacaaaaggctgtgaccactcccaggctgatcatccctggggctgggaggaaagttatttgcagaggagaacaagatcaggactcttcctaacaaaggctgagtaagaaactgggtttctgacctctctaccccagcaagctcagagtcccctgcctttcctctgttctggctctgtgtgtttgcattactcactctgtggttagaagttcaggtaagtaattctggaaaaggagcttttggaaaaagttgcctggaaaacaggacgctgcttggagtgtcatttctccttatcaattgaatatggacttagacaactcagctcaggtgaggggacactcattctgggtaaggtggaagagggagggcaggagagggggcctggccaggtttttgtagacattttgatgtcagcttataggctgatagcagcagcacactcgtcaccacacaatcaaggttcaacggattgcctaggacacaaattggtgagtagctgccactttgctcattttttaaaaatgttttaaaatttttctctacataattgtgtgaaggaat

SEQ ID NO: 71205 - DNA, 940 bp, Homo sapiens
aaagtaatgaatgcaaatggtaccaaaaagtacagaaaatcctatgatgaaaggcccagactctctccaacctcactcttccgcaaccctgaacccactctctaaagcagtcaatttttactgttttgtacttttagctctctgtaagcatggatgatgtgcttagaccgctatttcatgatttgtatctgttgagactctcatagtcctgatatgaaaaacaagcacttaattcacacaatccctctggtcctctctcatcttcctgatttttgatcttcgttatttttaattttcccctggttgcctaggtaactttaaatacttgtgaaatgtgatatacaaaatggtatcactctgcttcagagctctaaaatggagtcagaaagccattctaaaaaggactacctgcacagcttgcaaccttgcaaaaaacaaaaacaaaacagaaacttgccttgaacttttgaactgggccaaactgcaatgaccacagcatcttggaaaacagccaaatttcaacagcactacaactcctgaacagcaacaaccaatgaactatggactcacgtaccaagccagccacctgcaccaatgataattctttcaaaacaacttgcacaatcagcattcttttaaaaatctctactctccttttccttttcctctttggaacacaatttcacttctagcccaatctgtgtctcctgaattgcaattcctaagaccccaataaacactttgtcttactgctttactgtctggtcttttgcctcttcttggttgacattaaatggtgtcagaatagagtggggtacaacgcaactttcccctgcgttctggcactgccatggattcaagcatggtacctgtaggatccctttgtgttccatcgtctccccaacagcccaggacctcattggtgagtcctcttgtgtcc

SEQ ID NO: 71206 - DNA, 803 bp, Homo sapiens
cagaaaagaaaactgagtaatgacctacagacatggttaatcagttatacccttctcctgacatacagctaatcaccatagactaatgcagacctccttatgaaacaggcgtttctacctccaagggaaaaagataacaaatctttggctgaccaactgatgtttatcagcaatgcttcctcacatcaaatctttatcaaaatgaagaaatgtgaaatgtgatatacaaaacagtatcacttggttcagagctctaaaatggagtcaagaagccactctattactacctacacaacatgaaaccctgcaggaaaaaaaaaaaggaacaggaacttgccttgaacctttgaactgggctaaactacaatgaccacatcttagaaagcagctgaatttcaccagcactgcaactcctgcatagcaacaaccaatgtaccatggacttatgtactaagccagccacctccaccaatgataattctttcaaaacaacttgtgcaatcactctcggcatcctttgaaaaattcctactctccttcctgtctttggaaaacaatttggctcttagccaaatccgtgtctcccaaattgcaacttttaaggcctcaaatgcctagtcttactgcattgcactctggtgttttgccccttcttacttgacatattatacttacatctccatttctagttgtgttgatttttttatttttttatttttatttttatttttggatagtgtctcactctgtcacccaggctggagtacagtgatgctgtcagggctcactgcagtcttgaccac

SEQ ID NO: 71207 - DNA, 2159 bp, Homo sapiens
aatttattaaaatcattaacttttgttcacagaaaaagacaacccataatctgtcattggattaagaatttttttttaaaaaaaagcaaaaagcaaagtaaagacaaattaaaaagacaagtcaaactatgagaggatatttgcaacaaatatgcctgtcaaaacattaatatctagaatacataaagaactcctacaaatcaataaaacaaacaattgaatagaaaactgggtaaaagtcgtgaacaaacatttcacagaaggtgaaaaatgaatgtcatataaccatgtaaaaagatcttcaacctcattaataaattaataatcagaggaatataaatataattttatatccactagcttgtcaaaaattcagaagtctgataataccaaatgtttttcagcatgaatatcattaggaagtactggtgggagtatgtacacatataaacactttggaaaacaattttttagttcatttttcattaggaataccccagttttatgtgatgattcatgagtttatcttctgtcctgccacagtcattgtattctaaccccacattttttttttttttaactgagattggcaagcatgacagccatagcttcagctccggttctagcttaccccagtggttttcaatttcatttggttcattccctgggaattgcccttatttgcttttgagctcagataacacttttgagatgtttggaatagtttatccaacatttttctggtggtttttgccatggtacattgtaaattattttttcaatctcttacatgaaattagtcttttcctttttctaacttctactttggtcaatttttgttatcatatactaaaaggaaatcagtaagccctctctgttttcagatctgctgctaaacacacatatgtaattatttacttataattctcactatatattttatatgtgtttacatcttctttctgcttgcaaattttgttaatttttggtttctctacgttttttcttaatcttgcaaagggtttagctaatttataggtattttcaatgtaaaagcatttgcgttttatcctatctactaacatttttcttaattcattaattttagcttttacatttctgaattgctttttcactgttctttttctaatattttagatgaataattatttgttatattcttttattaaaatgaagacatttaaggctatgaattttcctctgagaatacatattgtggtttaaattactcccgttgctttctgaatagttttcaattttctttttttctttgatccaaagtttatttataaatgtgtttttaatataagcagataaaggccgcctttatattatcattttatttaaattggatctgtaaattatatttacagattaaatataatctgtaagggaactaattttaaaattctgtttcatctttctttttggaccaaatcctgattgatattttaaatattccattactttctcccttttcctcaaaaatagtatgctcaccaatccacacatacctattaactcaagtttattgattgtgttatttaaatcctctatgtatcagacaggaattgttttcagctgctagaaagaaaaccagcacaacagtaatttcaacaagaaagagatttattttctctctctcacacacacaaagcaaatctggcaacagatagtccaggaaagatatgccagctctatgatgtcattaacaatctggattcctttgagctttgcaatcttgaattctactttgtatcctcaaagttgcttcatggccacaagatggctgttgcaatttcggccatcatatccaacattatggacagaagaaataagaaagggaaggggcaaaagacattttccagttgagtcagccttctttacatatctttcctaaaacctcacccaataatttctgtttataaatcaatgacctccttccactctctttagctgctatgttgtttactgaacaaaggtttatgtttatgtttattagagtcttgatttttacaattatataatgttcttatttgtcctgtttagtgcttttaactttaaattccacttgtatctttttttatttgcatttgcctaatatttttggccaaccccttaagttaaatatgtatcaa

SEQ ID NO: 71208 - DNA, 2329 bp, Homo sapiens
tcacagctgcaactactcatttacttgtctgacaatttgatttatgtccacctactttgctaggtactaagttcaatgctggcagtcgtttcttctttttttttcttttctgttttgctcaccgatttctcgttagcacttagcacagtgtctggcacacgatagatgctccgtcaacttctcagttggataccagcatcccgaagggaacatggattaaggcagctataagcacggtgtaaaaacaggaataagaaaaagttgaggtttgtttcacagtggaatgtaaagggttgcaaggaggtgcatcggcccctgtggacaggacgcatgactgctacacacgtgttcaccccaccctctggcacagggtgcacatacagtaggggcagaaatgaacctcaagtgcttaacacaatttttaaaaaatatatagtcaagtgaaagtatgaaaatgagttgaggaaaggcgagtacgtgggtcaaagctgggtctgaggaaaggctcacattttgagatcccgactcaatccatgtcccttaaagggcacagggtgtctccacagggccgcccaaaatctggtgagagagggcgtagacgcctcaccttctgcctctacgggtcacaaaagcctgggtcaccctggttgccactgttcctagttcaaagtcttcttctgtctaatccttcacccctattctcgccttccactccacctcccgctcagtcagactgcgctactttgaaccggaccaaaccaaaccaaaccaaaccaaaccaaaccagaccagacaccccctcccgcggaatcccagagaggccgaactgggataaccggatgcatttgatttcccacgccactgagtgcacctctgcagaaatgggcgttctggccctcgcgaggcagtgcgacctgtcaccgcccttcagccttcccgccctccaccaagcccgcgcacgcccggcccgcgcgtctgtctttcgacccggcaccccggccggttcccagcagcgcgcatgcgcgcgctcccaggccacttgaagagagagggcggggccgaggggctgagcccgcggggggagggaacagcgttgatcacgtgacgtggtttcagtgtttacacccgcagcgggccgggggttcggcctcagtcaggcgctcagctccgtttcggtttcacttccggtggagggccgcctctgagcgggcggcgggccgacggcgagcgcgggcggcggcggtgacggaggcgccgctgccagggggcgtgcggcagcgcggcggcggcggcggcggcggcggcggcggaggcggcggcggcggcggcggcggcggcggctgggcctcgagcgcccgcagcccacctctcgggggcgggctcccggcgctagcagggctgaagagaagatggaggagctggtggtggaagtgcggggctccaatggcgctttctacaaggtacttggctctagggcaggccccatcttcgcccttccttccctcccttttcttcttggtgtcggcgggaggcaggcccggggccctcttcccgagcaccgcgcctgggtgccagggcacgctcggcgggatgttgttgggagggaaggactggacttggggcctgttggaagcccctctccgactccgagaggccctagcgcctatcgaaatgagagaccagcgaggagagggttctctttcggcgccgagccccgccggggtgagctggggatgggcgagggccggcggcaggtactagagccgggcgggaagggccgaaatcggcgctaagtgacggcgatggcttattccccctttcctaaacatcatctcccagcgggatccgggcctgtcgtgtgggtagttgtggaggagcggggggcgcttcagccgggccgcctcctgcagcgccaagagggcttcaggtctcctttggcttctcttttccggtctagcattgggacttcggagagctccactgttctgggcgagggctgtgaagaaagagtagtaagaagcggtagtcggcaccaaatcacaatggcaactgatttttagtggcttctctttgtggatttcggaggagattttagatccaaaagtttcaggaagaccctaacatggcccagcagtgcattgaagaagttgatcatcgtgaatattcgcgtccccctttttgttaaacggggtaaattcaggaatgcacatgcttcagcgtctaaaaccattagcagcgctgctacttaaaaattgtgtgtgtgtgtttaagtttccaaagacctaaatatatgccatgaaacttcaggtaattaactgagagtatatta

SEQ ID NO: 71209 - DNA, 975 bp, Homo sapiens
caaggaaattgtgacttgtctagagctttgaaggaatcttgcagtcctgtttattaaagccaggacgtgagaagggtcatatttggctgattttctttacttgaaatgaaaaggctctggaggaagcttgtagggaaactggatcatgtcaccttcacctaatgacatgaagcatatcctatcaacaagattatcttcttttaagggatactttagaagcttcttgagagcagaaaactatatacaacccgtctggatattttttacagtttctaaaacgcatagtaggaactaaatatgtagtagttgaataagattttctttttaagcattgtgttttagaatgagaaaattagacttttcccagtaatgcctggccataatcagaaaagtaatggctgatcctcaggttcagagttttgctcacagagaagtgagctcttatactttgttcctggcaggaaatttgttcttgcccaacttgctctctggaatgagaaagtggactttggccttttactaagctcctgtgtcccagtgtaactgaaaattttctttactgttttcccatctagatgttcaaagcaatggtgcctcctcctatctaccccaaaggtttttgtaatgatagctcttcaggacactgagctcttagaagaaaggtatatttagatgaaaagtactatcatatacaaaacagacacttttcagccaagatacattttaaaaccaaaatgaatacagtttctggagtgtcagttaataaatataaatgaatatactgaacttatctgcatcataggggaactgaaagaagtaattgatgcttataaactttctggaagtctttgaattaaagagtctaaaatgtgtaaggtatgattaccttccttattatgaaagttataattaatacacacacacattgttcaattcagattcacagctaggacttgtttaaattgaacaaaccct

SEQ ID NO: 71210 - DNA, 916 bp, Homo sapiens
tgaatggatagaaggtaaaagggacggatggaccaatggagggaggaaaggagggggaaagatggatggatagagatgggaaagatggggggaaagaggaagggaagcacggagggataggagatggatggatgaatagatggaaagagggaagggagggatgaagggacggtaggaaggagtgaaaaatggagggagggaacgaatgatggatgaaagaaggaatggtaggagagaggaagggtaaaaagaatggatataaacaaagaaggaaggaaagaaggaaggaggaaggaagggagggaggaagggagaagagatggcagggagggcgtgggcggcacctgtggtcgagttggcctgcgtttcggatccgagggcgacgcagacggagctcagaaccagacccagccagagaaggcctcggccggtccggggtggcggcatttcggcttcgacgcggccgcttcagagcggcggggacaggctgcagcaggtggcgcagttagcagccgccgccgcagccacagagacctcctcgtcgggaacccatgaagactgcgcaacacagccgccgcccgggcccgcaggcccgggcgctggccgcagcgcgagtgcgtccgtgcgactcttccctgcgtccctcccctccggggcgggttctagaggtgcgcgtcatcctgcagcaataggcgtggccgagagacaggcgcagagcgggggcgggccagttgccttgcaagcttcgcagacccagcggcccgcaggcccctaggtgtagaactgctaggggtatagcgattcagccactgcccttaacaactagcagttacccgtctttttgcctttgcttgtgctatgcctttcacctggaagccctgcccttccttctttttataaaagacacacttcttgt

SEQ ID NO: 71211 - DNA, 1354 bp, Homo sapiens
tgcctctgccaatctctttgacatctaggtgctcaagggaagcttcccttgtaagatctctgaggagccataggttatttctgcagagtccctgaactgctcctgttccacccactctggttccttattttgtccccaaccacactaacatgggcagtgtctgggcctccagctgtcagcttatatgtcctattcctcactctccatcccatagctgtggccaccattgcctagcttgattttggcagtttgtccctaagactagcagtccccaagaaaggttccaatacatgtgtcatctctatctttcacccccgaactagaatcaatggctgccaaacatcaaaagtacgaggtaaaaatccaatggtcttgtttctggcccactgtgggtatgcaacaggaaattcatgtgcgccttcactgctctttttctcagggacattctcccagcatgttagcaaggcccagttaaattcctcagggtgagggtccccttggagaagggagtgagttggtgtggatttctgtactcaaggtagagcacttccaataaccaggagctctgggcatcccgcccctgatctgggcaaatctggcatgaagtctacacactaaaaatagctttcccagcacaggaaagcaatggtagaggcttcctgatctggcttgcacaccacaggtgaagtaattggtcacttaccagtgtctccccacttagattccaaagtccactgtatcaatgacatcatgctaacaactggatgagcaagacatggcagagattttagaggcctttgaaagacataagcacttcagagagtggtagattaagcccacgaagattcagagaccttccatatcaatgaagtatttaaggggctactggtcaggggcatgctaggaccacccctccaaagtcagaggcaaatgattgtatctcacacctcctacaactaagaaggaagcacaatgccatgtaggcctctttgggtctggaagcaggggaccaaggggtgaaatgaccccacttattatctctcctagtgatccacatgggaatttgtgcttcctgtccccacaatacagtcaccactagccaaattcatctatttaaatttaaattaagataaaattagttgttattttatctgaattttagataattaaaattcagttcttcagacacaccaggtacatttcaagtactcagtaggcacatgcagctagtggctaccttattgaacagtggatcctggctattcaaatggaaatgcttccaccagtagacacagtaggagccccactgaattacgagccatggctgataactgaattacaagtcatgggaacc

SEQ ID NO: 71212 - DNA, 1280 bp, Homo sapiens
ccctccttctctcagcggacacctgcctccccctgctgattctcaagagtccgcgagctcttcctgcagcttctcctcgctcagctctcccacggccctgcccacaatggtttctctcagccccgcccggccctgccccacaccccgcctcttatctcagccccgccctcaacccagcccccaattgtttctgtcagtcccgctcggcccctcccccagctccgccctcctcctctcagccccgcctccaccccctccccagcggtttctcccagctcctccctgctggtatagcagctctgggcccaaaactcctgcctggtgtcctcgtcccacccttccacttactcttcctccctcccgttccttttcctccttccggttcttcgtcgaggctgccggtctcgaggtcccctggccttggcctggttggctggcgcgcatcagggccaggtaaagagaatagcgtctcctagcagccagggcgtgcgtaggtgcgtgatgtcctcagtgcgtgtcttcgagaatgcgagattcataatgtttgctgtctatatgcatggctgagtacgtgcctcccgcgtacgtgcgtggtgtgcatacatgcgtgattgcgagcccacgtacgttcttcgtgaaagggatgacgggagctgtatgaaagcggaagagttatagaccgctaacacctgtcactggccactggtttcccggagttagcggcaacgaccttgcagcctggacactagccaggcgctccctcttctcacagcggcccacgtctccttgcttgggagcccatcgtcctggctccggtggcctcgctgggtctcggggaggcagaggactgttctttcctgtggcgaaaagccggagtcggccctagacacccacgactcgcagggtccatggttccggaggccgtgagacctgccggggctgacaggtgccagggcccatgctgcgggagcctgtgtgctcagccttcttgcggacggtacctgagggctggggtttccctggatgtggggctgggaactcgtgcggggcgcgaccgaggcgccttttcctgtcccctgctgtcggcagggtctcggctccgctccttctaagcgcgtgtacccgcgacgtgcgtctgcgagtagaaagcccgtgtactgctccacacacagcggccccacctcagtccggtcttccctgcctcccgttggcccttctgctgtgagctcgcctggacctgaggccgggcggtgcacagctctgtggcctgtggcgccgtg

SEQ ID NO: 71213 - DNA, 781 bp, Homo sapiens
ctaaaaagcaattatgaaaagaagttcatgatcaaccagttcagtgccagatggaaataggtagagtgggtcagctggcagccctgtacatctgagtgttgacacttgtgaatcattctctgtcactatagtttccagagccttgccaacgcagcagtgggttcagacttaccaagatccaaaaggctggaaaggggatctggagccatgacccatgccttgggacccaccaaaccatgacagtgactatttctatgacaaagacatgctcttcaaagtaaatatagccatattctgccttagtgccatgttctctcccatctctccaaagcaatggctgcactctgaaggtgggaagagtgtgagaagaaagagaaccaggccacagaccaccaggaaagcagtgattgaaagcagcagctctagatttatcttataggctctggagagttattcagttatttactccacaaatatttattgagccaggtactattccaagtatgcaggctacgatactgacacagtcacggccttgaccccatggagcttaaagtttagtgggggaggcaggtattaatcaaataagcatccagacagacacaagggtacaaatatgcactatgatggaggagtagtaaatactacaggaactgtagaaacagggagcagtaaatctggtcagggaagtcaggaatgcttcccttagcaagtgccaagtgaggataaataggagttcactaggtctggaggagaggaaaagagagggaaacattcctgg

SEQ ID NO: 71214 - DNA, 1011 bp, Homo sapiens
cagtcgggcaagtgcaaggacaggcgcttgagtgcttagccagtgttttctccacactgtccactgggtgttccccatctggaaaagaaggacagcaatatctacttcctgcaaataaacttgtagtgaagactgatgagaaaatgagtatggaaaatgatcaggctcacccagaaatgcattatataaggtattgccataccccgacactgactccaaggattcaacagtgtttcaggtatccgttcaacaaagaagcaaacaagagagggatgggcataaacccaaggaaaaccccaaggactgcgaggaactggaggaaacagctggggtgggggtaggggtgttgggtcgagtgagacggccctgacgcggagaatggagggcccgcagcggcgcagaagaggatggaaccgagacgaagaagttgggacaccaatgagggacagcaagcagaaaagaatggggttcccttggggcaggacggggctcgcggccgggcccttccggccgtggccgggcaggggctgaaagcaccgggcacgggaggaggaagcgggcgggcgccgaggccgactgttttgcctggggaccgcttgcacccgcagggaggctcgggcaggcgcccgggtcctcgggctgcagcatctcgcccgccgtgcctccccggagccgaacaccagcccgcgcccgagcccgcagcgcggactcccgggggcgccaacgacgccgcctcacctcgggttgaagtcctggaagaggcccctcaggttcatggcggagaacttcaccgcggcgtcctcctcctcctcccccgcaccccgtgctgcacagcctgcgccttacagcgggttcatggcgccagcgccagccgcgtccacgctgctgctcccgctactgctgccgtccccgctgccgtcgccgtcgccgtcgccgccgccgccgccgcccggagaaacctgagccaccgccccctgcccctccttccgggcttccgtacgagggccgcgc

SEQ ID NO: 71215 - DNA, 1266 bp, Homo sapiens
gcagagcagaaaatcatttcagcaagttgagtcacattcctacagctgagcacgctccatccgaggggagaaaaatcacacttcccctcccattgtcatcggacgagggtttggggggcctaaatcccattgtccactgcttaattctggttaggtcatgctgagcacggggccacaggccacagagctatgcaccgcccggcctggggtccaggcgagcttacagcacaggggccaagcgggaggcagggaagaccgggccgagatggggccgctgtgtgtggagcagcacttgcagacgcaggtcgcgggtacacgcgcttagaaggaggggggccgagaccatggggagagcaagggacaccaaagggcgcttcgggcgcgccccgcacgggttctctgcccgaaacccaggggaaagaaaccccagcccgcaagtaccgtctgcaagagggccgagcacacgggctccggcatcaggggccctggtacctttcagccgcggccggtctcacggcctctggaccctgagagtcgtgggcgttcagggccgactctggcttttggcctcagagtacagtcctccgcctcctcgcgacccagcgaggccaccggagccagcgaggagacgtgggccgcggtgagaagagagagcacccggctcgtgtcagggctgtaaggtagctgccgcttactcccggaaaccggtggccagtgacagatgctagcggtccataacttcggctttcatgcagctcccgtcgtccctttcatgaggaacgtacgtgtgcgcgtaatcacgcacgtacgtacaccacgcacgtacgcaggaggcccgtattcagccacgcctatacaccgccaaatcgctaggaagccacgtattcacgaagccacgcagtgacgtcgccacgcacgtacgcacgcacttgccacaaggagacgctgttcagtttaccggatcctgtcccgcgccagccaaccaggacaaggccggggagctcgagacaggcagcctagaccaagaaccggaaggaggaaaaggaaccggagggaggaagaggaggggcgggacgagaccaccaggcaggatttttaagcccagagctgcgagaccagcaggaaggaactgggagaaaccaatggggaggggatgggggcggggctgagaggaggagggcggagctgggggaggggaagggcgggagtgaggaaaccgctggggcggggttgagagtggggcggggacttgaggggatggggcgg

SEQ ID NO: 71216 - DNA, 2903 bp, Homo sapiens
ggaaaaaacttagaatctagaattttatacccagctaagtatcatttaaatgtaagaatgaaatattttaaggcatccaaggcctcaaaaagtttgccacaaagactgtctttgaaataagttcaatgaaagagaatttataataaatatgagtgagttgacttccccagtcccctcttgcaaatgttcctttaatttctcagatctgtcaaccttcctcttactgtggcgacatctccaggatagagttcttttgagggagccattctggagtttttaggctattctgtaacaatctcaagtggctaatttttgcttttattacaatcttatctttcctgctaagcttataaactacctgaggacacaatattattcatttctgtattcccagtagtacctttctcagggttttgcacatgggaggtatttattaaatgtctgtgccagaaaggaagagaggaaaagaggaagggaggaagttataggccagaagatgaagctagggttgcttccattcaagagaatggttgttctctctggtttttgtgcacagaggattaagtgacatcctagtgtgtgtcaatattgtgcacttcagcagatcatctcctgtgttaagtctgactatgagtgacttgaagataattgagcattattcatttcaccatcaaaatattaaaagcagcttagtttgaatccacttgaattaatcatttacttggttctccatgacacttaagctccctctgagtcattcatgatggaaaattatatgctcgcatgctagtaaacattcccaggccaggaaaaagatgggaaagtaatccacaaggggttctaaggttgttttttcggggggaatttttcagtgcatctccacagagttggtgaaaaatctcccttcttccctcttcagtgaggcagtactttttgcttatctgtggttctataacaagtgcccactgaggctgtatgggtgatgcacacctttcagcatccaaactctaagacctgtcttgtattggacccctttgctttccagggaagaggtgggtaggtagttagtgttccacacttactttcccttgacattatttgttgatatttggaggcaggcagaacaagagacatcaaggttgataggtgcatcagagttaggtcttttcccttctgtaaacaaatgccatcttttccattcatctaaaaagcatttgtagatgtttaagatgcttgcctgtgaactattttcaggcttttcctagttatttttttgctagtcccaaagaaaacgggctgggcagagcagaaaatggcagtggcaggtcgccaaaacaaatatatgacacatgcatatcctggaggccaacattatcacatcagcaaatgccagcagagagttcttcctcaccattatctcctccatgttttctcaccaccaattcagtttttggtcatgtgtttttataataacattgagttgagggtgttagcagcaattttgacatatggaattaattgcattatttctcaggtatttggaattcttaaaattccagaaaatcatgtaacatttggacaccacatggatttaattcagtatatagtcatgaagcatctgctcagtgcaaggtcagccctgggcagtgcctaggtacacttatcagtgtgaaggaagtgccaagggaagagtacaaatgaattggaggttcaaagcagggataggatttcctggtgaaacaaaaggaaagacttcttgaaaaggtagccttggggactagacataaacaacagatataatttctacaggcagaggcatgttaggaggcaggaacaacttgagcaaaagtaacaaggtgggagatcataggatccatttagggctagtaatagtcgctatatattgagtcatcactctgtgccatgcatcgtattaagtgttttacatgcattctcttatataactgccacagcagtctcatttgttataggtagcatcattccgaccttacaaattaggagaataaagctcagaacaattatgtaacttggtcacctgctaagagatggcagaacaggaattcaaaccaagtctgtcagactccaaagcctagctttgtagccactaagttttatgactcagaaataaacgtgactgggaagaaagggtaggaccatgctgtgaagagctttaggctttagatgctaagcgaaggatcctgaacttaaaagtgccagattgtgaaataaaagggaaaggagttttcctgtaacaggaaatgaatagtcaataagaggtcaacaggttagagaccaatgaccaggtccaaaacttctctgttttcttcatttgttttgtaccttcctgggaggagaatgggttgagtaggaaagaaacctccctgttcctcttagagcttttgtatggaatttccacttcttgggggtcctttttgttttgttcaattcctcgctattgtgcatggtcttacctctgaggagggaaggtcagaatctgaacttctgtggccaactagaaaattgaattgcttaaatttcagttcctattgcattatattgggtaactaaagcccctgttatctttttcatttttgattagttttggtattttatgtagcttcttctcagacacaaaaagataattcattaattgtccatggatataatcatcctcttcaatcttgtctagaaactggaaggccctgttgccctcacctgtagttagcacctcttttaccaaccttgatgtgggatcctgaaggagcaagttcttggagtcttgccttctgactgaccctggtgcttccccatgtggccctgcatgttgtggcatggtgttccccctccctttgaaattgtcggtaacaaagtatcttttttct

SEQ ID NO: 71217 - DNA, 2596 bp, Homo sapiens
tccaggaagcagtagagcttggatttgaacccatgtatctctgatcctagagcctgcctcctatccactagggtatactgtctataatgaagaaagaatgggataggaagggagaatacctgggtttgaggcctaactctgtcatattctggctgtgtgaccataggaagttatttatgtgctctgagcctccacttcatcatcagttaaatggggataatactccccctcacacacactacatgtacatacacaggtcactgggaaagttaatcaagggagcatgagggaaatgctctgtaaagtatgccccaagttagcctatggcctggtgtcctatgtggcacacaggctaaccttcaggtgccacttcacttccttcgtgaaagtcccaccctagtttgaagtcactctgcaatgcaaattctgagaacccctggcctctcagagtcgcagctaggttctcctttcaaaactcccttttgggttatcagcaggtactgcccccttctctccccttcctccccccatgctctctcatgctctctctctctctctctctctcacacacacacacacacacacacacacacacacacacaccaaacaagatgataggcccagtcaatcagccacttgctcaaaaatcacattgcaagcatcatccattttctccattctctgggagattgctgcctggagttacatgtgggcccatcagacccacagaaagacctagttaagccaggccctggagtgaagtgctgagttgatgaaggttgaacagagcatctgggaaggaagggccagtccaatggacaagggcttggcaatagatggcccttctcttgtttctattgtaaataggtccaagatctgctcatggctcctctttgctggggacattgtcttcagtgccatctgtatcttcctcctaagtcatgggaaggggctttcctcaggtcaagccacaagtgataaggaaagtagcttgtccacctctagctctgtggcccaagtggtgggagatggcctggagtagggagaagcaacatggcctgcagagtctggcagcctgagccctggccccagctttgccctgccttgctcttggttttccataagtccctgcccctctgtgggccttggttcctctagcttcagattaagggagttggccttatcccatctctgacctcccttcctgcttgaatcctccttgtatccaggcctatacttcaagctctataatcagggagtggaaaggctttctggtcaaggtaggaattgttctgccagcctgactgagagtttcgtgtcggccctggtgcctgctgctgagctctaaccatttcataaccccagatcagagacactcattcattgtcctttgagacaaattccaggtgggaaaaatatcatgctttaaagcagccaagcagcaactaggctcaaatccatttatttacaaagattttccacctcttggcccatctgcctctgagtaacctgaagcacaacaaagatgatatgtgtcccagccctggattttgggctaagcgtgccttaaaaatctgcatcatacctagattccctcccaactatagctcaatcctgaacaacctcagctgtccacagatatttggcccaaggaaagccaaaatctcaacagttaactgtctcaccctaatccttctctatacatgtgaaatcccagtttagaaaggaaaaaatatttatcacattcttgcatggccattctacaccagattgagtgggtgacaggcaggaaaactggaaaggaaatgcctgcaatatttagttaatgtggtcatcatattttatttggctgcatctccccaaatgcaaatagaaatgtcccactttatttgcatgcaagtcttttcttccacagagggagagatgggagagccgcctcgagtcccgcagtgatcttggagcagagtgaggcatttgcttggacttagagcagttgtactgggttccaggtggctggagatgtggtttctaggacaaggccacatgtaaatactttatctcgatcaagagcagcttggaaaataccacaattccgtttttcagaaaatcattttgctggtacctttaacagaatggaaagagcagcaggcttggaatagaattactgcagtcaaatctgagttctagcacttgaccttaggtgaatggcttagcttcttggagcctcagtttcctccttggtaaaatggggttaaaagccctgctctactgacctcactgggatgttacgaagtgcccatgggaaaatgaatgtgaaagcttttgtcaactgttttaggaacatattttattgttgttgttattgttattaagtgaggaggctagagaatgcctatagagcaaaaccaggcaacagttctgtttttaggtggcttggactcagaacaacccatcttatagatgtgatttggagcatatagaatcattctttttttggtggggggagaggtaatcttttttattgtactttaagttctggaatacacgtgcagaaagtgcaggtttgttacataggtatacatgtgccatggtagtt

SEQ ID NO: 71218 - DNA, 2041 bp, Homo sapiens
ctttttctcacagttttttgccctaagactggctcatctttgtggagttgccttcccgggggcatggttggagcttggcagagcagccatggcttgaagccagcaggtctagtggagtttctcctctgccataaagaacaggaagactgttgcaaagatccctttctgtacagcctctcacttaagcatcattgaaatcctaagtcagatactaatgggattctcatttcatggaggagcagaccacgcctgagagagggtggctggactgcccaagatggtgcggaggtagaaatggatggggaacccagagccttcaaactcccaaccacatcaaggtgctgcttagctcccctctgggaacacagccctcaacaaagagtgggcctcctccctgctctaaacaaaaacccagcagatggtggagcaggtttgctggaagcctcagcttaggcctcagtccattaggaccaccctaaatggggaggtgatgtctttgggtgcatattgcagaatgtgtggcaactccagtagaagaaactctgagctcagtagcacaggtggccctatcctcaggccctctacagtgctgcagccacaagcgcccagcgctccactcccagtagaccctgcccctgggcctgccaccattctccatggctgacaggctgaaggctgagcttctaagccaccctgccccacagtatgtcccactactcccactgggtgggtacccaggataggtgttcagggaacagaaagtgagcttattcctccttcaaggaacttcttggaacttgcccagtgaaaactgttcagaattctgaagaattctagaattctagtaccaaagtctgggagatggacagggccctcagagcagcttgtgcagattctccaaggcggggtgagcatcagcggcactggggctgctgaatacactgcagatttcctgggctccatgccagagccactaaatcagaatctcagggtcggagcaggggtgggagtgtagccagctgcatttttgaaagggatccacaggtggttcagatagactctacaggctggggaagtgaaggccccagatcacacattgagtcatcacagactgggaccggaactgtggtccctgcctcccactgtggggctctctctcctatgtcatcagacctagctggctgtcaaggctgccaaggctgaggagctatgtccatgagtcacttgctgacaacactcatcctgccttgagggcatgagtcatagcagaccacagctgaggatgggcagctccaaagatgtcaatgggagacggtggggatgcctcatctatcctgctgtcctaatactgggtgctcggtgccctggagcaggaagagtcccaagatggaaccgccagtgcctcttgggcaagagagcccagtctttcagaaggaaacctgcacaacttcagttcagtcttccatctggtgctgtggatccaaacatactgtttttccagccctcagccaggaaccggagtcactccagtgaacgggccagatgcagcacctgccctcaggaaactgcaagaagcaagaagcccatcactgggatgaggcgcaccaaggggcagtgcaagatgatgctctgggcatgccagtaggggctcagccaaaagatggaggggagcacggaggccactcgcaggcagaaggaactgtgtgtgcacatgaggaaggggaggcccaggtggctggtgccagagtggaagtggagggccagggaccattcagtgcggccgggagtggggcagggccttggaggcccagtaaggatgctttgttttttttttcagaaacatggaaaaagggccgataggtatgtgaaaagatgcacaacatcactagtcattaggtaaatgcaaatgatagccacaatgagataccacctcacacccactagggtaaaaaaaaaaaaaaaaaaaaaaaaaagaacaacacatgcacagaaaataacaagtgttggcaaggatgtacagaaattggaacgcttgtacatt

SEQ ID NO: 71219 - DNA, 472 bp, Homo sapiens
agcctgctgcattcccaattaacacttttcaaaatgaaatttagggtgcttttcttccttcttcctaatgaggtttcttccttccctgctgtctcgctacaaagcttgattctgtctgagtgtgttcatatggtgctctagtgcgttatctgaccttgattggtgtttggggagccggttaaatagattacatgggggttaccttggcaactgtcttcactgatttagcaatgcggttcattcttggacacaggactctcggcaactctgcgatcccactgctgtgcgttaatcattaacaccaagttggacatcggctctgccaggcagcagccaggagcaagactggggacgagctgccttgaagtctttttagctatgactaaggaggtcaccacatggatccctaagtgtggggccacaggagaaggcgatggcaagactccatcctgaggtctgtctgtcccttttc

SEQ ID NO: 71220 - DNA, 624 bp, Homo sapiens
cctggaaacagccctacagacacaactagaaataatgtttaaccaaatatctggccatctcgtgatccagtcaagttgacacagaaaattaaccatctagacctggaaagtgatcttaaccttgcttgattagcaaacacaactacaacttaacatggtctatttcttataacgtccatctcagagaaaagtgaaacttaagctcaatcaattggaagccaccaactaacctataattatctaacttgggatttcccaatgagatagaccaaacaaggcaactatacacatgtaaccaatcaaatattttctttggcttacttctgtgtttaccctgtaaaacattctccccactccttcagtagagccctaaccactttctgtttggtgctacctgattcatgaatcaatgtttgctcaaataaactcttaaatttttgttttaaaaaaggaacaacactaggttggcaattatgtggataaactggatcacttgtaaatggcaattagaatataaaatgatatagctattctggagaacagattggcaattgcttataaagctaaactaccatatgtagtttatgtatgcaaatgccatataactaaacaattgcactcctg

SEQ ID NO: 71221 - DNA, 412 bp, Homo sapiens
cattatttataagataaaaatattagaaacaacctaactggcacatccatgcagtggaacattgtgcatccatcaaaaggaatgatattaaagcattttaaatgatgtggagcaatatgtctgttccaatgggggtagtagacatatctgatgccccacatcacattcccaccggtttcagtcacaatgcagtgcacacttccatgggagctatgactcacctaccactgacatcatctcccctggagattaggcctcctgtctttgcatggtcagctccagagctttactcgaagctacgggagccctcccagctggcctataaacacaatctggaagtgcaggattgttaatggctccaggagcaacccttggctgatgcagccaggggccaatggataaatactccaac

SEQ ID NO: 71222 - DNA, 3340 bp, Homo sapiens
gtgtccgtcttgggataactgcggagggagccaatccagcccagcttgggcgggagcatcgcgtgccctggtccagtggaacgggagactggccagcgagcctggactctgagctaagcgtactggcgggcgacgccgacagcgtccgcgctaagggtgggggactgggaagtggggagtggggcactcggccgggatggagagaatgcagttcactaactgccacctgagagccctggtccccgctgccgccacagcgggtctgtttggcagtcagggcgcgagctggtgagcggatgcgtgggcggagggactggcgctacccacccagcagccacccactgcaggtgagtgcccctcccagggcgaggggaggagaagggcctggccgctagccctagggtcaggctctggtgaaaatgggaagggggatgggggctgaataggctactttgtgatgagactcccgtccctgtgacacttcagggtcctctggggatctgtcattcctcttgcaagctctcttgttctctggtccctctcctcctctccttatttcctcctctcctctcctctcctctcatctcctctcctctcctctcccttcatcgtgtctctacctctatctccgccggtgcctctctcggtatctgtctctcagtctctgccttctctgtgtctcgtacggtctcctgtctttcttggtctctcggtcctgagcgctctctcgccctgtcactgatgaccgctggcttttggctctccgtgctcgctcttcgtgtgtcccggccacgcacggctcaccagctcgttttccccagacgcggaaagtctaccttcggcgtgcgggtttcccaagcgcgccgggccccgcctgcggccctccggcgggctctgtctgctggaggcgctccgctaaccctgctgtcgcctctttccaccagcgcaccgcctaggcaagccagctgacgccgggggcacagaccaccctccactgagtgcggagcagccaaggtgagtgcaccgatgccccttccgcccctccgatccctccccagctgccctggttcgagccgactggagaaatgaggctgcaacagcgaagccagcctgcggccgctttctcctctaaagactggtgggagggcccgggaggcccctcgggcggccgcagctctttggctgcccgctgccccatcccggagtggaaaccctgagtttccaggcttcgggctggcggggtcgcgggcagggcagcgcggcttcccctttaaggccggagccgctcgtcgccgtgagtgtgagggtgtgtgagtgtgcggcgtgcgtgtctcctcctccccgagtgacacagcagtgagaaatgcctatcagtaacttaaacccccgaaactccaccttccgggcgcgcggcgcggagccgggcggtgggaatggagcgagcagattgaggccgccactgcagcgccgccagcatgaacttggccgcgagctgaagcggccggcggcgggcgggcgcgggggcaccggccgctagccagggggtgatctgcaacagggctgggttccttggcggccgcctgagtccaggctgcccgcgccggcggccgcccgcccctcggacactgcccccgccgccgccggagctctgcagcacggtaaggctgagggcgggtgcaggaagtctgactgttctgggggttccggggtacacttgtagcccccagttatggtccccatcgctgaggatcggggtcccaggggtgcttcgagtcggtagaccctaaagtttgctctgagcacacggcccacctggcgctgcgggcggccacccccttctcgaaccagcccggctgggctgggcgcagctcgaaacgccggagaccacggcctttggctcggcgcccgtcgggcgtctgaaatccggcggggacagccacgtaccggggaggaaaggtagaagggcgcaagctcctcgggctacgctgggctactgggaggctcccactctgtcccagcacccccgggtcgcttgcagcctgggtgtcaccggcgacggtgccttcacatgccagctgcctgagcccaggccagtaggcagtgggcgctggatgaaggatttccccaccccaacgctgtttgccgcctctgagcgagagtgtggagtgtgcgcgccgaatccgctgccctgcactccctcccctgccaactcctgggaagcgcagcccggagctgagctggtgttcagggcagcccggactgggttcctgcggagcagccccggcgcccctgcgtcagagtccgcgcttcaggttccccagcatccgcgcgacgacagagctgggcgcccggcgccggctagcgcgggcgggaagccccccggagcgccgccaaatacttttctcggccagttggcttggccaggctccgtcccaatgcagtgtgtccgaagcctcctggaaagctggagatgtcgtctgattctgatccgtgattaaattcggactgagcagacactaataggattagcctgccagaaagctcggccctgaagccatcggaacctgtgcaaacacgcgcctcgggctggagcattcactcccgccccgccgcgcttctgcagctgggtgcggctgacctgggcacccggagtgtgggtgtgtgtgagcgggcgggagcacagcgtggctgggggacgtggggagaaggggctgcttttgctggggtggcttgtcgttgttgtttggcaccacggtgccccccgggggcgcggtccccacggtgaacgtgctgctcacgggtaggcaaacccaggccggctccgggacattgtctgcaagggcgagcgagccgagcttactagaggcggctgcgctggaacaaaggcgcaaagtctccctgagaccaagcaattttgaaagagttggctagggagagggcctgggtctcccggggtagacccccgcgggaattgcgccgcccccagcggccccggcccgcgcctggggaattgtgttccctggttgcggtgagccggcgagcgacatcgcagcggcgcggcccagctcttggcaggcgtgggttgccgcccgagtgcccaccggccgggcggggtcgaccgtgcacccgccggggcttcccggccgccaccgcagctctgggcccctggaggccgcgcagcttctttccttccctccctcccacctcttcttgtctttatagatcccccctccctcccacccccgccgccgccgccgccaacaatccgctttataaaaagcccctttgtttcccaggaggctggagagagggaaggggaaaagggacgcagaggcagagg

SEQ ID NO: 71223 - DNA, 2131 bp, Homo sapiens
ggccctctaaggcagcgaggtgtgaaggagtggactttgggacaaaaaggaggtttgttttactacgttgttcaaacttatgacatcctcccaaagtgggcactgtcgttatttggcttgagccccagctacgcttggcagcggaagacaacagcttcctctcgcatggccctgccctggagaattgtcacagctcctcagatggagacatcacagttaggaagtgtcacccaagaagcaagtcttcacccccagccacaactgccagatttcattcattcatccatttgtttcttcagcaacaagcacttcctaagcacctgctagctgccaggtcctatgctgggcatggggtgagtgtggggttgatgaaccctgtattgatagcgaacggtattggggccccctcactaaccatccctacccctcccgccactctttcgggctctagggatgcggaacagggcagacgcggttctcagaagctgcccctcccccagcacaacgcgagggtgggctttggagcttatggcttgtcagcaaaagagagcgcatgcagggccttggccggtggcaacctgagggtagcaggttcccatcccagaattcccctgggcaggccagcttctgagggagtgtcctgttccctccggacttggctcgatggggagccccagccgagttactggcagtcaccaccctcccgggtcccacccacgcagcggccaacggaaagctctggccctcccaggctggagtttgtgccaggcaggctccagtagcggggcagggcccgggtgcttcgctcggcagcccccacgccccttcctccacacccgagggttggcagaggtcccctaagccctcggcctgttccgaccgcgcgcgagtctccgcaccactcggtgcccttgaccgcggacctcgctgcctctccattggcccggccggtcacgtgcgcggccgccggtcccagccggctacagagccgctgctgtgcccggtcttgcaaatcgccgccgtccagccgcctgctctggtgcgagtcttctccgctttacgactcggactcagaaaagccggcctgggcttcggccacttccccagcacccgtgtctgcccttccaattgcccctttcctgcctggcacgacctggccttgctcactgcacgcttcccttctaagtgagccttctttttcctttccctcagccagccttgaagtctccttcgacagagagtgagacctgctgtcctccctgcccttagtcgctgtccactcagcctaatgcctctgtggaagaggaggagccgccatctctgaactgttaatggaggtggggaaagagagccaagctaggaaacaggttgatagacggatcggcccagtcaactgtgaacacagctgctgattcatgcaatatgtgtttactgagcacctactgggtatcagcaaggtgttaggtgctagagacggagcagggaacaaaacaggtaagatccctgcccttagagacccaccattctagaggataaagccagacatcccaggtgtggcctttcacaagaccgccccttagatgcaatcaggggcattcattcattcattcattcatgcaagtgttctctcaccaagtcatttctgagctctccccaccctgggtcctgaattctgctgggcactgtaaggagaggagagaggagatccatcagcaccagtcctagccctcaagaagctcaaagcccagtagatgtgaaaccctataattatactggaagctagtaagggctgtgcctaaggtattactctgggcacagaggacaatgcagtctgagcatggctgggtgttctgcagagagcaagagcagagccacttactgagaagggtaggaaagctcaaacttgttttctgacaccacggttggtatcatgtctccagcctaggctggtggcttgacttgctgtcctgtgaaaacaccagtgtggttgtgactcattaggctgggcgggtggcaggaggattgccaattacatttgaatttcagacacacacactcaccacacacacatcatttttaatgtaagtatatttcaaatattacatgggacatacttatacaacaaaattca

SEQ ID NO: 71224 - DNA, 1572 bp, Homo sapiens
cttggaaaggtgctggcacagctgagggacaccccagctgttagttgagtttgtgaattgcagatcctgccccagagtcagtgaaatttctttttcccttatactatctcaactttacgcagccaaccctgtgtacccaataatagctcaatttagtggcatccgctaaagtcttgtatagagaagttttccctctggatttcccctttactgaagaaaaatggggagacccagacaagggtcccgggactacgcttcccagccgcctccgcccggcgcccagtccaacttcccttacagggatggcccctggcatcttggccccgcccatccccagcaccatattgcgaactacaattcccagctgcctccatgcgtcggacccttcaaaatgggcttcccagcagcctctcgggcgaagagccccgcccttcggagctgctccccaggtcgacccggcgcactcttcctgccccctgccccgtcacgtgatgcagtcccgccaaccggcacggggaggcgggcagcgggcggtggccgggggcgggcaggccgtggggggcggaccccagagggggcggagcagggcccggcagccgagcagcctggcaacggcggtggcgcccggagcccgaggtgggtgcgcgctcacggctggcctggctcggagccgggcactgcggggacccgtggtgaggggatcgggaggaggaagttgggactccttgggccagcgggtcgcgcggggccttgccgcaccgtcagggttgggtgggggtttcgtccaagcgccgtcgctgtccccgcggggcagggctgaggccagggagcagcaggcaggtacctccggcttcctcccgttctccccgcccaaggtggccggccggcggcgggcgaaggtcgggacgggggtaggggttggctggccgtggagctgggggcggacgtctcagccactgcctggactttgcttccccgtcccggggcggtgagtgggccgggcgtccgccctgcctccccggcgacgctccgcggctggtcctcgccttggccctccgcacggagcgggcgtccgtcgcatccccggtgggccctgcggagcggccgcagcccggcactggccgcgaagcctcgatggccgctctcggccagtgtttctgtgtcatacacgagaggtttatctgcttttgcaacagttgagggaagatcttagagggaacggttagttccctgatacgcagtcggaagtatgtacaggcacgagcaagcgcccgtggccgggttgcctcccttaactgtcttttgctgcgctcaggaagtgaaaactaattttagtatttgcctaagcaagtaagaagtgaatctgctgcaaaaattatattagagctttatagacgcacgcatcgtttgaggcgaagtgggttgcgactggttttgaaacagatacaccagatcttcacaagaataaaattatagcattttagaattgactggcatcctgaagtttacattgttcatttgtttcctggatgggggaactgaggcccagagagggtaactaatatgtcccgg

SEQ ID NO: 71225 - DNA, 518 bp, Homo sapiens
caaagagattttttggagtcatcatttctccaatgagtgtcttttagatggtaagctcatcccagcctcatttttactcacatttccccccaccccgacatgcaaacagtaagtgatttcaaatacctagagaggtatttttcaaatcctttgctgttttcatagttagatagctgactgtagctacagaaagctctgctgaggtcaatattggttgttgatttcatgccggtgtctgctggactctcaggctaccttgcacaagggtttctcttcctgtgcaatggtttgtactgtgaacctcttatctgaaatgatcatcagtccttgtgtggtttgtaaagaaactagttcattttgaaatagctcaagagaaaagaagcactcattcttaggaacaagagtgctcgctaataaaatggcattaatgagagttgactgtaaaagttcatctgtttaataccttctaagttctctcatattctgtatgttcaatggcttcaaagcaaaattttaaa

SEQ ID NO: 71226 - DNA, 2397 bp, Homo sapiens
tccttcctcctagccctcctcactctgtcatcttcttaccccaggctcacctcctcttgtgcgtaagatggctgtcggggcttcaggcatcatatcctcaaagttcagtttgaagttattaagctggtggggcaggatgggtctgggatgggcatgagtaactccctgtctgcagatctgccttttaacagtgagcaaattgttccctttatatcttcttttccagacctgggtcgcaggcctcctgtctacacccagagcaatcacaggcaaagaggcttaatcacgagccacacacccactcccaacttaatcaggggtgaggtgagaggggatgagctgttggatattcgaacccaaacaaaatgagcaaggaaataaatctagcccagaaagcaaatgtcctaaatgcctcaccaagatattggcttgatgttcatagcagtgattttttaatcaacagaagttaaatgttactcttaacataaaccatgggcggaagctccgagggcggcatcagaacacttggttgccctacagatggcaagggggtgggtttgtggcggggcggcggggtgcgtatggagggggagagtggagggaagaatggggtggggaggaattgctaaaatgcacggaattgctcctgcttcaagatgtcaagaccgagggagcttgagctgttctataccttttccgggaaggacaactgaggtgggaaatcatttttgatacttgaatgtcttcaaacttctttttacaccccacgtctctgcagtcaacccggtgtgactatagagtgaagcacgctacgcataatccgtttggggattccgaaccccagtggctctgtacgcacccaggtcgctggagcaggaggtcccagatccccgctgtaaggctccgtgggcgagcgcccaggtggggctgggcgaggtgggggttcccggcgccggccccgcgcgccgccctccccgcccccgctcccgccccccgacccccgcgcgcgcggccttgtgggtaacgcggggccgccaggtgacagctaatggcggcggccgcctgaggcgggcgggcggtatagagcgggcggcaggaggcaagcagcgaaaccttcccggccgccgctcccgtcccgacggcggcttccccaaggcggcaggactcggcgcgccatggacaggccggcggcggcggcggcggcgggctgcgagggcggcgggggcccgaacccggggccggcgggcggcaggaggcctcctcgggccgcggggggcgccaccgccggctcccggcagcccagcgtggagaccctggacaggtaagcggggcccgggctgccccggcctcccgcgccccgactcccgagggccccgcgcgaggccagcccgccccctccccgcgcgctgcgcagggcctggcggtggcggggtgggcggcccctcttcatcccctctgggccctcctcccccccacccccggaaacctcagcgccccatccggggactgctgccctcggacctgctgcgggccgcgcacctggctcacttccgccccgagagccccagctcctggaaccccgggaggggcttcgcagctgtcaaaccacttccggcgccgccacctgctgcccttggcgatcgcttggctgtccctgcccaggccaccaatcctcttgggagggagatcccacccgggctctcctcttctagcatcaccttgcctcgtgtggttttaagaccccaattctgctgtggctgcttagggtctttgatggggggttgggagtgaggacggggagatgggaccccgcgggcgtgggagctggtgcagatcgaggcaaaaatctgagatggaaaacgtccaaactgctcaggaggcaagaaaacagaaccatttactttcagttcttcacactttgagggaaccagtttattgttttcatgaacacacaagcaagcctactgcttctgaggcagctgcagaactaagagaaatcagttagaaacataaagtgaccgtgtcgaactgggaggggccaccgcctcctccgacgacaagagatggcctatcgtgtaacccggaacatccagttttcccacaacttggccatttccctgacaccagagtgcactcaggcagcatgcactgttggaatgtagctcagtcagttttacatgcccattcctgcctgtcttggtcatcccattgtgccaaacttttgggagtttccaaaagcacagaaacaagaaacattcccttcacttttgtttctacctcagtgtaattacaatatattttaataaattaatcacccaagtggttagtgtcactgaaaaccagtcacagctaagacagcacttgaaatggtgaggacttcactcatctgcaaatatt

SEQ ID NO: 71227 - DNA, 587 bp, Homo sapiens
ccagggatgtgtggcatgccccaggtgctcagctgcaccattgtccaccatcatccagccccactctcctttggtgaccctggaagcaacttgaagagcccagtttgaaagccactgcttttggcatgcaaccattatataaactatccacctggcggcttggattcaggctgaggagaaaagtagcggagaggccagggttgttgggtgggctggagccctcaggaacaaattcagggagctggcagacttcggctagaccttcagggtcactggaacaaagttgggatgaggtcatcagagggaattccccagctgggcaacactttgagccatggcaccaagaggaatgggtgtgtttatgaaatcaaatttagttcataagaatattccatcctttgattgtgctgaacatgggttggataaatcaagggtcaaatcatgtcctgtgcaaccttgtagttgcagtaaaagcttaatgtagcacaagtgtgagtcccttctcctaacagcagcttcataaagggaatctactatactcaccaaagcaaacaaaaaaacctccaagcttttaaaactcttctctt

SEQ ID NO: 71228 - DNA, 666 bp, Homo sapiens
ccccctcagaattcactgggctggggacccaggcatgtgctttggaagtacattcattcgttggaagagtcacgtttttggaaagttttttgtgttgaccccaaaactggccagtagattaccctggcactacaaagaataagtttgtcccctgctgtcgtatgctcctttagacatgtggatcccgtgctaagggtcactggctacccgcaccaggagatcctgtctccccaccacaacctccacttcaaccacttcctccctttgacttgtgcaacttttctccatgaacttgtccatgtgcgtcatactgccgggaaacagcttgctcaaattcccttcccaaatatacctaatggcagactgtggcctctatcaacaatcacactcaaattcaacacctgtgtacacagttaggcgatgaagccccaacagccgttggcacttctgtggtgctttgtaaacactgactaagcaatctggtgagcagcgtcaaaaacagaatgaggccaggcacggtggctcatgactgtaatctcagcacattgggaggccaaggcaggatgattgcttgagcccaggagtttgagaccagcctgagcaacatagtgagaccctgtccctataaaatttttaaaaaattaaaaattagctgggtatggtagt

SEQ ID NO: 71229 - DNA, 1951 bp, Homo sapiens
cgtgcttccttgattcagcgggatttctctctcctgctccttggcaaaacatgaccaaagtctcaaaaactgaagcggacggcagaagcacctagagagctggttagacctacgcctcgctgaccccccccccccccccccacagcccatgcccgctgtgatcccgatgaaaggggctaggaatccacctaggaagttccccaggtgcttctgctgtcggtggcctcgcagcaaatttcgaaaatgactgctctcttcaaggttttctcaaaggtaaactcttggggacagctgttgtcaccagtggtacacctgctcgttcaggattttagggggcccatcccgctgtttccagcccagcgtcaggaggggacccacccctcctctccggctactccgaccgcggcggagtcaacccccacgggcccggggctcggacccccgccgctccgcctcgcacagccgggccggccggtggcagccaccgcaggcccgagaggcggggaccgtgccgctcatgcgcagagcgacccctgggcccacaaggcggggtccccgcgcggtccccgcgcgccccccgcccgccttacctcgctggaccagggtggccaaggagaaagcgaggcagacaaggaacgccgagcgccaggccaccatggctgggagcaggcggagggccccggaggagcacagttagcgcgagagcgcccgaaggggaggccgaggaggagcgggaggaggagccccgccgcctctgcagggtcccgcccaaagcccgcgcgcgcgcgcggcgcggccccgggaagatggaggtcgggcgcgctagagagccggcgcctgagggcgcctgggctggggttaggccggggggcggggcgaggctgcagtatcgggggcggggccgcgttctggaggcggggctccgggcgaggggcgtggcctgcgggcacccggtgggtggggaggcctgggttgggttgggctgggtccagcggcagcgcgcggtccgcagaccctgtcccacctcggtcctcgagaccgaagtctcggaggtggccccgcggacctggagcagtgagtcaccagtgccggggagcgggaggcggcagcgccggtgggcgccgatttcctcccgggtgaccttgagaagggctcttccccttctggccttggtgttctcccggtgaagggttgttcccttggggcccctccagacaccgtccagcacggagccccgcactctgtccccacccgctgttccctgcaggagtgaaaccctggccggagactgaagaaaaggaccgttttcgtgactggctgcggtcaacaagcagtgacacgtctcgagaaaacgaggccgggggcgcccgggtgggcgacaggggaggatgggggcgtcccggagccgaagcgccgcgggctcgggagactgggggtagggactgggtcagctctcccgaggctttgatgaatgcgctgaaagtgcaagttcatatctgcagagtcgatctcaaaaacgtgcttaatgaccgacaaacgcgctgcagtcctttcccatgaacccccgcaaacggagtccgtctcccagacccgaagaaatcagattccgatacgatactgtgccgaccagcaaaatgcccgctgcagcagttgatgggaacgctccctagaagagccccagctgcaaccggctctcgaagacaaagaggaagcgctactgctctccggagtggtagcgtgagcctgtccctgccattatgcggcaccggctgcccagggccacatcctccttagagggcggctactaccacctcccctcaatatccattcggcagctttcctgtgcccccaacccagccctcgctgccataggcacccccctcagtggctcccaccaacccctaaggaacagtggggtgtggggtctccctgagatggagccgaaatctcc

SEQ ID NO: 71230 - DNA, 1115 bp, Homo sapiens
ctcagcgctttgggaggccaaggtgggtggattgcttgaagccaggcgatttgaggccaaactgagcagcaaagggataccctgttactacaaaaaaattaaaaataataaaaatgtttaaaaagtaaaaagttccctccagatgataggagacggctgagcagggagacgagttaagggagagacagatagacgatctctgcttggtagtgagaggtggggaggagcagctggattcggacatgtttaggatttgctggtagcctggatacgggaagtgagggcgagggaagagccaggcgggacgctggggggatggtggtgccattctctaagcacggatatgggggccggggccgaggttggggaatttagtttgggacacactgaggtgaggtagtggcaggtcacgtaattgatgacttcagcaattgccctcaggccctttcacctttgctgcccttttctctggctgtctgcaggcagaagagtcctgaatggtcactgacaccggactgtacagaacgggaaacagatgccctctgtgcatctaaccctctccttgtttgtttgctcactgaaaacaaccaggcagtaaagcctgttacaaagactgagaggggaggatcactggaactcaggagctcgaggctgctgtgagctatgattgcaccactgcactcctgcctgagcaaaagagtgagatcctgtctcaaaagaataaaaataaaaagacagagaggcagagttccagttttctcacagatggcctggtatacttggacaaaacagttgcctcctctgggttgcagtttttccaaaatatgccaaaacatcccacgtgatcattagggggtgcaagtcagacagcagatacgcaagcaccaggcaaactgttaaggaacaaaatgcaaggtggcatcattaccattcacatcatgttctccgctttgaattgggccatttgctgtttctgtttacagttccttactcttatcattttatctgattgtacttttctctgataaccagtgaatcatgcagaccaggtaaaaacataaccaaaagtaaatggaaagttgagatgatagtctagacaaatcatgtttaaaaga

SEQ ID NO: 71231 - DNA, 1023 bp, Homo sapiens
ccgtagccggcgccggcgggtcgttctgtttgaatgaatgatcccagcagccgcgcccaatgggcgtccacgcctgcttaatatgcatgaggcccgcagccaatggccaggcgaggaggctgttttaaacggcagagcccgctggccaatcaggcggctctcgtggaggcagctagcgcgaggctggggagcgctgagccgcgcgtcgtgccctgcgctgcccagactagcgaacaatacaggtacgtctcgcaccgcccgctcccgccgccgccgccgccgccgccgccgccgccgccgccgccgccgccgccgccgcagcgcccgcacaactttccggcccgcgccgccgtgagcgcgccctgccgccgcctccccctgcctctactccccattcccttcccgccccctccgccttccctcctgctaggcggccgggaaggaagaagcaattcaggtgtttcaacttttccaacgcgttccccgagctccccgctttcgggggtcggccccctcggcggacgcccgcccgtggcggccccaggggccgcagccgggaacccagggcccccgaggccagatgtttgggcagctgcggctgcggcggctgggcgagcagaggggcggctgcgggctgtgggcgctgggcggcggcagcgggaagggggccgggagttccccggcccgcgacggactccgctggggaacgggcggccggtgcccgccgggggctgcgcggctggtgcccgccgggggccgccgcacgggcaaacttcgctcccgggcttggcccggcgccgcgcgggcccgcaggctacgccgctggctctgcgttaacatggccgtcgcggagcgcccggtggcccgggggggcgcgggccggccgcccccctctcgcctcccgcccgcccggcgccgccgccgccgctaacatggctggcgcggcgctggcctccggcgagggcaggggaggcgggcggagcggtcggcggggcgcccggcgggctccggcctcggccccgg

SEQ ID NO: 71232 - DNA, 2162 bp, Homo sapiens
atttaaaaaggaaaaaccattcttacctcagggctgtagaaaaacaggtggtaggctccatgtattaggtcggctggctcagtttgcctaccccagaggtagattctctttgtaccccaagttcttacattaggtggttcttactcacctaaaggtctagatgaggcccagatagagattactattatttttattaaatattttacagtttgttttttagagacggagtcttgctatgctgcccaagctgctctggaactactggcctcacgcaatcctcctgcctcagcttcccaaagtgttgagattacaggcgtgagccagcacagtcagccctagagggggattattcagtttgaactaaaacctggacttcctgctgcccagtccattgccctttccaccactctaagctgctggtttagtcatgatttcagatgtggtctttgtatccatgtggtgcagaaaatagctgtgtggtcagcggccctttccaggcgctgaccatgttaagggctgtcctcttattagcagccagtggcaacttaattttgtcaagcctgactccagacttacccaccctttcgtttttacctctctcgggttgcgcaggcccgggaggcccatctgttcttactatttgagtccctgttgtctcattggcggctttctgagcagctgcaaaatatgtttttaacttttaagtggaagttgggggtcactggcatcgagtctggaacagtcattctcagcaagagctctttgaactctgacattctctagttttacggactcgggtgagtgttttaactcctcccagctgccaagggcttgacttcctaccactgcgggcagtaattaatgaggcatttatttgctcaagtagtggcgaaataatgcgcactgcttttttgtgttgtcgtcggcggaatacgctcagttgcctagcaccacagccctctggctggtagtccctcttcgcggctcatatgctcgggtctccttgcggcccccagctcagcgaccgagacgcagacgaggaccagtgttcacgcgagttcagggggcggcgtagccgccgcccgcccaggaggaccatgttgcgcggcaagtcccggctcaacgtggagtggctgggctactcgccaggcctgctcctcgagcacaggcccctcctggcagggcgcacgccgcggagccaccgccggtaagtcatgtgagcgcccgcccccgcgccggcaacagccctgcgtcgctgcggcgcgccgcgccgcgccgcgcctgcgtactgtggcccgccgcccggcgcgaacgggcacttccggcgcgaacgggcacttccggcgcgaaccgctacttccggtgcgaaccgcctcggccgttccctcgcggagcttactgagcgcggccgccgagcccagctccgccgccgagcgcctgtgccggcacggctacaccatggagcgcccggataaggcggcgctgaacgcactgcagcctcctgagttcaggtagccctgagcggggcctggaccgcgaggcggactggccccagcctggagcagggcttgagggaaggccctagctgaatgggtgggcgtgaggtctggaccccggggacctggcctcagggaagggggcggggaaagcaggttggagcctgagacgtctaaactcccggccccgaactttcgctcgggaacaagggatccggggtcatggggaataggtcagtgggccttcagctcatgctcctatcctagcactttctctcgctgtgtctatattgcagtctctttcattaccgcagggtcagccttctgaggacaggaatgcagtctccttcatctccgtgttccctagggggcctgcatagtcggggcttaataaatgtttgctgtatgaatgaaggagtagaagggaatagtcccctggtgtgagattgcttcacttggggaatcagtaagatagaggctggtgactgagttgaaggaatgtatgagagagcaggtggttctggcccaccccagtaggcaagggagtggtgagggagttagctatcattcgttaagacctactgtatgccaggctcagtgcacgtgctttacatacattgtcagaattcttaatttctctaactgcttgatttcccaattttgaag

SEQ ID NO: 71233 - DNA, 711 bp, Homo sapiens
tttaaaccttgctgctctttggggactttctatgctgtccctcttttatgatcactcttttatttaagaaaaaatcaacaaaaccaagacctagattttaaaagaatgttacacgtgaaatgaagagggcatttatgtctgagcgctggcccactgtgactagccttggcctctagtcagcctgaccagcaccaaccaggagtgaggagcaggcagagggccagggctgagaggaatgcttgcgaaagccagagcggcctctcccagagaggaccagaaaattgtgggaatattttgcggttttgttggttgtgtaatactcgttgcactgggggcaggggaaggggatgaagggaaggaggctaaagagcagcctttgtgggtgtctaaacaggaaaggcaggagtcctccacccacagacagccatccaggaactggctgcccaacaggagtccaccctgagctccacagccatgcaccacagccaagaaaaagaagaagattagtaagaataattgaattaaacaaaaatgttaaaggccatctgccaaggtatgaaactcaccgatggtgttagaagtccggatagtgctgcctttgctgggaggcagtgacaaagggggcttctgaggtcctgctcacattcgggtccttgatttggctttctttacaccgctgtggtcatattctgacaactcatcagctgtaca

SEQ ID NO: 71234 - DNA, 1016 bp, Homo sapiens
gggggcacaggagtgctcagaggttccgtggaagttgaagaaatgcagagtagtaccacagagcacagtggagggctgaggtgggtcttgctgaggtttgagggagatgattaactgcaccctctcccttctcttggaaattcagagtaattaacacaaaagacattggagtcagagagatatagaaatgtggttacttcacccacatcccctatagttctcaccttcgtaaagcccttcccccaatgtacaaccctgcctcctttgtgtattctcattctttgtaggagggtaacacttccagctcctccctcctctctcacaggcgctgttctgggtgttgaggatgcagtgacagggcagattaagtctttgccttcatgaagtttacatgtttatgcagggaaacgggcaatcagcagacaaggaaataaatctgataatttccagtatgaaatgccatgaagaatgactacaggataatgactgggggggactctcagtctgcccagggtgcagggaacatcttggtctcctcttgggctctctgggaagcttggaaccacagggtaatcagctctgaaggcccttttgccatttctaattccaatgtggaataaagggagcgggaggaaggcaaaatgacaaggctattaatatacgaaaggctgccaagccattatcgtttatttcaagtggtggtaaaagcagatgactcatccttcagagctgcaggactttgcaccaaacagtctggatagtttattggcttgcctgtttttctgagcttgaagtcagggtgacagggcttctgagcttgaataatcctgagaagccatatttccttaccccaaccctaagaaagactttcccagaaggtctcaagggaacaaatagatgtttcagcaatggtttggagccaggaagcttcctggtgaagatgaagccaagcagctacactgaagagtcttttttttttttttttttttttttttttgagacagagtcttgctctg

SEQ ID NO: 71235 - DNA, 1537 bp, Homo sapiens
gggcgcgacagagcggcagcactcaccatagccaaaggagtccgctgccggttgttaggcaaccgacgtgtacactgactcggcgccgttcccaccgccccgcgcgcgcagccccgctccccattggccgtccgctcgtcgccgcctctccctattggtgcagggccgaagagggtgggactaacctggcaaagccccggcccagcgcggggaggggcacgctggcgacagagccccgtctttattgggcaagatcacgccgtgagcgccaattggctgagtcgtcgccgagctgggccaatcctcttggtggaggaagctcggctgattctcggctcacgcgggaggggagtaaagggtggcggtccgggcctggagttcagtgggtgcagcctgcttgcgagctgaggccagacaggggggcgcctacggacgggtaagagtcgtggccttgccattggaggtcaccctgtgtcagcgactgggcagtgcgggagggtggggagctacggggtcgcccgggtcgggtgctttctgggttgacctaaggctgagtttagggaccgagtgcatcagagcagccagaaacgattaccttgcgtgttggagcagggactgtactcacggggcaactgagacccggagaggggaaggggtgtgctgagtgttgtcgcagaggtcggacggctgggacctaggaactgaatccagccgaggctcgctctttgagggtggcccttcgagagcacccctagactgacccagatgtataggccccagaccaggttccaagagaggatcactttagatcttacctggctaaaagcagcccaggacggtgaactggggcctttgggaacggactttgaaaggagtgagggggatgtgagcgagcatgaggggcggggagaggtcatcaaaatatactctttttgacacccacacaatgcagataaggaggagcattccaggccgagacgccctcatcagcagagtcacaggagttttggaagtgagaggtatgcttggagaattaaaagggagcgtgtgcaagggctgtggactgacatagacctgcagaagtggagctggaggtccagtttgccctctttagctatccccgtggcttttagccttcacctgtttttcctccaggcataggggcagtaatctagggagacagagggcagagagtaagtttctcagacagagaaaggcccgaggcttattagaaccttttaaatggagctgctgccctttgccctcttctctcttcagcagtgaacagattcctgacttttgggtcatcatcatccccccaagtagtacgagccagagttctcactgtgatctccaaagcttggcacgacgtgtccccttccatcgctccacaactcttctctcgtctggctcactccagccccagaacactggctttgtggttgaacctcatgtgccagccacactcctgcctctcatctttgtctcagttgtcctctccgcctgcctcctcttaggcaccctatttaagtattgc

SEQ ID NO: 71236 - DNA, 906 bp, Homo sapiens
ctgccccacatcccccaacacacaccatagaattatggggttcaaaatggtaatagtgctaaggttgacaaaccttgctgtagagccttgacgatctatttgggaagacagcagggacggaaaagaaaaagggatggcacagaaccacacccctcaccttccccgaaatctgggtagcgggcacaggacgtgtgcgcctgcgcgaatgcgcgctcgccaccagcgtacgcgacgcgtgcgcgcctgtgcacctcggcgagcacgcgcccgtagtgagtacgcctgcgtaggccgccatttcttgaagccccgaactcggtcgcagtgcccgccgggaaaatgcgaccgtccacaaagtgaaatggccgcccgggacgagctcggcctcggcggggattctcttgaggccatgcccgtgccggccgccagaggtcgcccgaggatcacgaatgggcccgaggagctggctgccccttcccccgcgtaaggtctgaagccgcggccagagtggctttggggtgaccgcgcgtggaccgtcgccggcgggaggaagcgcggtcccgcgaggggccgaacggggcccctgcggcttgagcttgtttcgcagggagccctggggccatggcctctgggacactggacacgggtcgtcagggctgcccagggggagggggtgtggacgtgcagacagggaaggcagctggaccctccaaccacgctgggccctcgggctgaccggggctggtctgtggggcagtgaggaggggcttcgttccctaggagtttgatgagggagcgccatgggggtggcgtcatcctgacatcccgcagggcagtggagccttactttccctaggttacaacacagttttaactgtcccaaactgtggggactccgccctattc

SEQ ID NO: 71237 - DNA, 1234 bp, Homo sapiens
cctccccacctccacccaagcgtccagcccgcgcgcgccgctcccccgcaggctgatcagacttgcctgcccagtccgcccccgcccaaaccccgcccccttcccgccacgcccccttcccgggccaatcggggacgagactggggccggggcggggcctcgctccctcagaacccccggcggcgctcacggctccggaaacgcgccgcggggctgttagctcggctgggcacgggcggctccgtggcgcttcctgccacgccaggcctgcctgggccgcgccagcgccgctccaccgagggccgcgcgtcggccgccgccgggcctgggtgagtgtgcgggccgcgggaggatgtgcggggggcgctggaggggccgcagggcggaggtgatcgtgggggcggcaggaggacgtgtggacctgagtgagcgtgcagggccgcgagaggatgtgcagggggtgcaggactgtgtgcggggctggagcgagtgtgcgggccgcagaagagtgcacggtggagggagggggcgtctctgggcagttggagagctgctcggccttgggcgggccagagcagggaacgggtcccggatgacgagtacgaagaggcccgaaggccttcccgaggcgggcggggggcggcgatcccgggtgggaatcgctaaagtgtagaggcctgctctgctctttgggggacgctaggagatgggaaccgctcaggggcggagagaaaggacccctgcccctagctcctaggagcccgatctggagggggcattgtaggggtgggggttaaaggacttttccctggtctaggggagggactgagccgcagtctgggagctgggagggtgggccaggtgggaacagttcccgctggggagtccctcctttccttttgagtgggtgggagtgggggggggcggttaagcctcagcttggtggggagaatgggggccggtaggtagcctagagagagagctgtggagaggcaggggaaagggggcggtgagccgagctcaaggccctctgtctgaaccagtctttttctgtcgccctactgggggccgccatctcccacttcagtgcccccgcccccttaaactcctttgctggctcctccagtctatatttgggtgattaattatatatcttttccacacacaccccccactcgcctgccgcccaaagtccatggtccctttcaaacaaccccctgcccccattcctggc

SEQ ID NO: 71238 - DNA, 1080 bp, Homo sapiens
aaagtataaatgaaaaatgtgggcgaactgttgatgccagctgatggatccacagggtttcatgaactctgtctttgtttatgtttgaacttttccatgataaaccatttcttaagagtcaccacgaaatgagtgtctggtgaataagtgaagcattcatgaatgactgcagtccaactctgtccttccagagataatgcgagcgagatcccgcaaggggagatgattgctcaaggtcacgcggaacagtcaaggctactgagattccgtctagctctttctcaatgtgtgtttttaactttacacaagcaggacattacttttaaaggaaaagtgaccataaactgagggctgcaacataggaggggggaagggcagagggagacccaggatgccagcttcgcctaggggcaggggcgaggcagacagcctggggaggttagaggctctgctgtgagagggtttctgcaagatgaaatcactcaaatgccggctgtgtttggacatcttgagagaacatttccacacacggatggggtctagggttgagttcgtgatacgagcaaacagctacccaaaggacaatgattaactcctgggaaaacaaaatgcagctcgcatggccccaccgtgagcagcatttatgtggccgcataatttccaagcatggggataggaaggggtagaacagcaaaggtttgggggatgggactgatggaagccttcgaggaggcccccaagacgtgggcggacccttgtcttggcacactcctgcccctacatccttcgggccccagagctccctgacaccactggacccaccgccccccaccactctgcttcctgccagccctccagatggcctgtccttgccccctgtgtttgctccctcctgaggtcagcccctctgcaaggacaccggcccttcccctctggctaggttaggtcaaggacttggcctctccaacgcccactcctctcagtcacaaacagggacacctcaggcaccaacctgtacccgagctcagccacggacacatctgggcccccagaagggccctcagctctccagagccagag

SEQ ID NO: 71239 - DNA, 2312 bp, Homo sapiens
gctgtttgaagcctcagggtccatagtcatttcttatggcaaccatgggacactcatttggtgagaaaaagccccttgaaacacacaagtggtgggtgccgtggatcaagggccgccaaccacagtcaagccccagggccgctggctgggcagactggaccccacagaaccaagccacatggaacaccccctgacctggaggacaggtccctgtcagaactggctcaggaggaactcactgactgcgagggccgggctgggctgggccaccgggaggaaggctggggacacagccaaggtgggggagggacaggcagactggagccccctccagctacaccctcttgctcacaggaccgtgcctcctagccagacttctggaaagtcttcttgacagtcacctgccccaaccaggtgtcccccccttctccttcaccccctttggacagttcccttctctctcccatgaccctcctccatggcctggtgcttcagctccatgacctctggcttcaagtaagggggaggggcaggagggactgggacggcccagcagcctgttctcagaggctggcaccgtgagcaggagaaatgaagggcaaagccaggagacaccaaatgtaggttaactgcaaggaaggagggaagggaaggccatggcagaggctccattgtgcagacccaccccactgaaggctacaggctggccagagccccagcgcctcacaggcctaggagcccgggcttaccatgaagcccagtagccacagtttctggaccccagggaggtctcacggctgtacaggcactgccacccagggtcctccaggtgccagaggacaagaggttggcgagtcaggaacctgccacagccatgctcgtgctaaggggctcagaggatgcctgggcccaggtgcaccctggcttggaataacctgaccttcattcaggtaaccttccgactccccagctaggatatcaaagtcatggcgacagacacttggtcgagtccactcttctatcaccagcacaggtgcttcaatatgtgttgaatgaatgaatgaatgaatgaagaggttcagtatttcctgcagggagcagagggtggtctgggcagcctctgaaatggacgactgttgttgaggcatggctggcgtaccctccccctctttgaagggtagacggggtacccgggggaaagagccttccactcactgccctggagccaaatctcttcctcttggtcagtcttctcgcgccacccctccgggcattggcccagaagccacttgcaaagcggccactgcccggcaggtcagcagtccagggggtgagacagcccctggcagagccaagggaggagaaagagctggagtgtgaaggtgggtgaggaggggctggggaggaagagtcggggggtctgggagcggggagttcccctctcctccctgggtcccggccaccccctcccagtctggctggcctggctgccccccagctccagtctcccgttctcctcttgtcccaggctggcccacgatgggcaggcgaggtagccggggcacaggggagcaagcgccgtcccacagctgtggtcctgcccgctgtgctgggggcacctgccaggccagaggcagctccctcctggggacaggtcagcagcaggcccccagaggcccagcagggaagtccagggtgaagccaagctgtccatgggaagtgagcgagtcccccaaaggactgagccagtgggaaaagaccaggccaaagggggctgtgagccaccttcacggcagggcgggagccaaggcagcacctccccccagggccaactgtggagccacatggtctgaaggaggtggaaggagagttgggggaccctcctctgccttaggctggctcagctggccaggctggctgcgggatcctgggggcagaggcctttcccacactggcatctagttgaaaaaggaggttcaatgagtttaagcgtcctgatctggaggacagggacgttagggctttgcattcaccaggcaccggtgtccccttaatataccgagggttcagcgctcccatgtcccagccttgcccacccagccctggctgctgggagctgagcatgagttaggtgcccccttggcccctgagaaaccagagctcaggggtttcttttcttcagagaccctgggccctggccaggagcacttggcccacagcaaggagccctcagcaggcctgtgctcccaggacgaaagccgtccacccagggcttaggggaagggcggggatgccgctcagggaacctccgg

SEQ ID NO: 71240 - DNA, 638 bp, Homo sapiens
ccaggcagatgtggggcagcgtgtacagcaggagggtgcaggcacataggcaaagatgtgggtgaatgtactttgcacatgtgatggacatgaagtgagggaacagagagaggactgcagcacgctaaacagtgcccccccaaaatatctgtccacctggagcctcagcatgtgaccttctttagaataaggcaagggaacacgcgatatcctgcttcgttctggcaactgcaaggcgcgagttggggctggaatgtgggcctggaggaagtcggggagaggactccggggaagcgagcaggagccagatggctcagggccgtggagctggactttgtccttgaggccacgaggggccactgaagggggctgagaggagaagtggccaggcatctgggcaaggacacttcctctggccttgatgtggaggatgggtgcgaggctggggccgtcgtccaagcgagaggggacagggcctgggtgaagagaaaatccagcaatgtgaggggtgattatggagagagaggaatcaagggcacccccgagtttggggtgtggagggaagaactttgggacatccaggcagcaatggagctacaggcatggaacccaggagacactgatgtcacagtcgtccc

SEQ ID NO: 71241 - DNA, 2762 bp, Homo sapiens
atcagcaacaacgtgacccagtggtgcaagtcttccgaatcccacgctaccatcccagcaccccgtggaccaagagtgggtgggagggcatcatttccagaactgtaacatagatcttcctgcctctcgggggcattctgaagaccagaaggcaggggacacaggaaaaggaactgagcaagtcatgacgaagcagaaccctgggaagggttggcaataacaaacacaacccctgccacccccaccccagacaggttctacctgttccatcgggtcccaattccagggtccaccagctgcacacaccagtcccagggctagggcacaggcaccctcctgcctaactcgcctgcttgctccataggccataccttttaggagaaatgaagggaatgcagagaagcaacacaacaaagacctccgcatagaggaaggtggcaactgcagtccactgcagactcatcctgttgctagaaggtttcccacaggaagatgtgagcttgtttcctggcagggcacaaaaggtacgggacttgtaagcgctgggcagccaagaacatccagttcagttaccctgcgaggctggggccgccactctccaccctgaccccctgcactttgcttcaaagtctctgatgcgctggcggaagcagggctccactcggcagggcctcttggccagcagcgttcacaggccccacaaacttccgttcgctggtcaattacctgccccctccagcacgtgtgtcaacacgtccagagcggcctctcccgacgatccctgccccaggaagcccgagatttccgacgcccgtttaactgaaaggcgttcttcgggaagagcagtgccagggcaccaagaggaggacgcctcggcacccatcgggcgctcccttccccgccaggcagaactcagccgcagaggcgggcgctctgcgggcccaaatccccgctaccaggcaggcccaaggccgcacctagtccaagcgctgccgacgcccccgcctcccaccgtccccacggcgcccgcggagagaaaccggcacctccctcgaggatccagcggccttccgcccggggccgcttcgcctccggtgggctggaggcccgcaagagcgactcctagagggcaggattcgggaccaagcgcaaaggcaggtctcgaccaagcacctcaaggccccatacggagaaagttctagacgcagtatcctcagaagccaggggtccttacagtagccctcgcgggccccagcgcccacccagagcgaggggcctccgacttggccccggcctggcacaccgtcccggaggcccatcccggccgctcctccaggtggggcttcaccgccccccgccccgcccccgagaccagcttctagaggcgccgcccggtttcccctcgcccctgcctctcacacgcaggtaggctgcgggccccgagattccccggcccccgggcctccccgcgccgctcgcctctctccctcgtcgatgggccggggagcctccgcggtcccggagcccagcccggcgcgcggagcccgctcaccgagtttcccacagtcaacgtgcaggccccgccgcagcaacagaactctcccacagcagccccggccccgcccctcataccgcggccggaaaccggaagcgcccgccgggcaccgcccaccagccctcgcgaggccccggaggctccgcccacctccgcttcccaccccgccccggagcggagggccggcgctccgagcgggagaggaagaggcgcctcgggctccgggcgagcagggcggggtggagcgagcacgcgggcggggcggggcggggctttgtcgggccggcgagggccgcttctctagtccgcgcggccgtcccacgtctctgtggtgcgggaggggccccgccgaggggcgagaacgggaggtgggggtgtgggcgggccccgccgaggggcgagaacagggtggggctcccgcgcccggactccgcccctcgcccctcctccgcctcctccccttcccccgactcgcccctggggaagagtgggtggggattctgggccggtggaggagtcactgtcgcttcagccaggctgcggagcggacggacgcgcctggtgccccggggaggggcgccaccgggggaggaggaggaggagaaggtggagaggaagagacgccccctctgcccgagacctctcaaggccctgacctcaggggccagggcactgacaggacaggagagccaagttcctccacttgggctgcccgaagaggccgcgaccctggagggccctgagcccaccgcaccaggggccccagcaccaccccgggggcctaaagcgacagtctcaggggccatcgcaaggtttccagttgcctagacaacaggcccagggtcagagcaacaatccttccagccacctgcctcaactgctgccccaggcaccagccccagtccctacgcggcagccagcccaggtgacatgccggtgctctccaggccccggccctggcgggggaacacgctgaagcgcacggccgtgctcctggccctcgcggcctatggagcccacaaagtctaccccttggtgcgccagtgcctggccccggccaggggtcttcaggcgcccgccggggagcccacgcaggaggcctccggggtcgcggcggccaaagctggcatgaaccgggtattcctgcagcggctcctgtggctcctgcggctgctgttcccccgggtcctgtgccgggagacggggc

SEQ ID NO: 71242 - DNA, 2039 bp, Homo sapiens
gccatccgttacctggagggccaactggccctgtcgttccgcagccgtctggtggcccacgcctaccgcctctacttctcccagcagacctactaccgggtcagcaacatggacgggcggcttcgcaaccctgaccagtctctgacggaggacgtggtggcctttgcggcctctgtggcccacctctactccaacctgaccaagccactcctggacgtggctgtgacttcctacaccctgcttcgggcggcccgctcccgtggagccggcacagcctggccctcggccatcgccggcctcgtggtgttcctcacggccaacgtgctgcgggccttctcgcccaagttcggggagctggtggcagaggaggcgcggcggaagggggagctgcgctacatgcactcgcgtgtggtggccaactcggaggagatcgccttctatgggggccatgaggtggggcaggttggggtgccgggcacggagggaagcgtgtggcagggaggcccgggggcaggcagccgtgagcggtggggacagtctggggcgggccggggctgatgccaaaggtgtgggcaggccatgggagagccgggctggggtgggcagggcctttgggcagccgtggactcaggcgcggcagtggagaggcaggaaggctgggtggggactgtcctgtgctggttgcctgcacgctcgaggccacttctgcttcctctcctcctcaaggaggttgtcctggccttagagctgcgatcctagcggtttgagcctcgagagctcctgcccgccccactcctgcagccagccaggaggagacgcctgccattcatgagcggggaccgagggacgcagcctgctgcctagcccctcctgggcccttgggccctttgaaggccggcgtccagcagagctggctggccaggcaggccggcattatgggcatgactcagcccaagcggaggttaatgagcagcgcccagcacagcagtgggacttggggtcaaggccacccccgcctgagcccacaggcctgcctggctaccaactggctcagctgccttcccgggcccccagaccagagatgccgggcccaggccgccactgcggcgggacacacttcctgctcctggcgtggctgtccttccaaccctgtctgtctcctggctccctggtgggccggggccggcgggccagacaggcgctgggaaaggttactccaggtcaatgctccctttatctcgcctcagcccctccccttcctcgtgcctggggttgcagctgccttgggccctgctctctgcgactcagtttcggttccccagtgcttcttgggaggaggggcacaatggcatccatcccccgaaggcctgtgtgtgctccctgggtcaggtggcctcttgccctgggaccttgtctcactggctgtgcaccagcagagaagcaggcttgtccccgaattccacggagaggggcatcccgggtgtgggccagactgcagattcagagaaaaggcccctggacttcagccaccaccctggcttccctctcctcttctcccgcatgctgggctgcagggccttggcaagcagctgcagccttgggcgaggcgcttggcacattccccgcagctacattgtcagccttggctggcacccctgccagctcccagcacgagtctggattgccagggtgcttgcttcaggaatgggagatcgggcttgcagggagctcagctgtgcaggccgacctgggtggcgggggcagaagagagatcactggttctttgaaggccttcgtccgggctagcttcaggaagtagagagattactggttctttgaagggctagcttcaggaagtagcacgttggccaagagggtttgttggccagggcaggagggcccggtgtgcattcacggcctgtctgcataggcctcggctggaaagctgtgtggggtgagaggaccctcgggtagcatgtggcccatggcagtcccactggctgatgtccccgtggacactggcctaggctcagatcagg

SEQ ID NO: 71243 - DNA, 2553 bp, Homo sapiens
actgcccagctacccaccgttcactgtcccctactcccaccccaacgcacacacaggcacacacacaggggaggtcagggaggaggcacacatgtcttcaccaagagcctacaggagcccagttgctggagccatcagagcctctggaaagccactatatactgccgtcctttcagcagcaaggtgggagaagtcagcatcgtcaagagaatttcattaggcacaagcagtctcccccagaggtcagaaggagaaaacatggcaagtagagatgtccctggggagtggccgcaaagtcacggagttctggaaggtcagagttgacaggatcctttgagaacatgaagtctcctcccctctgggttccaaaggggaaactagaacccagagagaggaggaaatggcctaaggccacgcagtggctcagtgtgggagcatggcctagaggtcaaacctcttacccatcagggccaggtgctggctggcagctgcttcagatggtttccagcccacctaggacctaaattaacctcttcttaaataagtgtaaggaaagaagactcggacctgaatacgcaagaccgcacacggagaagagcagaagcaaaacccccgcagcctcagaaaccctagctccttcccattccaggcgcctcgaggggaaggcatctggggctctaagactgggggactatgggggatgactggcaaagtccggttctttgccaccgggataggtggcaaagcggtccacgagagaggaaaccgtggagaaatttgagtcccggaaccggattcccgaagcggtttgagaaaggcgggccgggatacgtgagtgactgcctcagaagggctccttcaaggacactaaggaggtgacagccgccgtggcccactctcccggcccgtccggagggccccccgccacccgatgcagaccccctgggggagccggtccagggccaacttcggccaatcccctcagtgacagcggaggcggccaatcaaccccggcgcgaagccctttccccgcccctggtggggcccctagccaatcggactccagactgcttcgggtgcggctaccccaccgctcccctgcgaccgctgccgcggtcccgtggctctttccctgctcacctcccagggacggcagagaagggctggcccgagcaccgccttcgcggcgctgccggcgacggtcgctaccttcagcgccatgacggaaagtgagagcctccgcacgtcccgacacgcagataccgctctcgcgagagttcgacggggtgcgaagtttcggggacaggcgcggacccggtactgcgcacgcgcgcggtcgcaccgattcacgcccccttccggcgcctagagcaccgctgccgccatgttgagggggggaccgcgaccagctgggcccctggctcagggaggggccacgtcagtgctgccagagacgtcacaatgccggcccagccgttcggtgcgcgattggctgccgctgccacttacgcgtcgctcttcctcgtttgcccctcgtgttcatgggagctcgttttcttttcctctaggcagagaagaggcgatggcggcgatggcatctctcggcgccctggcgctgctcctgctgtccagcctctcccgctgctcaggtagcggcccagccggggcttctttcttgcgagcctctgacccacggcaggtggtgttgggggcaggagggatgcgggggtccggcctttcagggtccgtcgctgcgggccgggccttcccccgagaggcaggcggccttgggacggggggaccaaagcacctcgcgcacgtttaccggcagccaggcttttccttgtctgcccatacgaagaggagtccccgagcctccatggtgcgcccggcccccaagctgcagcacggaacgtgacacatgtcccggctcccgctccctgcggggtcggaccggagcgaagctctgtagcgctgagcgatcgcggccaaaaacggggctggaggagccacataagctaggaagggacctcagtgaggagagggagcaagagcggggcgagttagatggggagccaaaggtgcgcagggccttgagtgccaggccgaagactggcttttccggagggccctgccttacccttaccagagttttcggcagagccgaccaggggtcccgtcgatttgcattcgtgaggggctgaggtctgaactccagagtgtgtttaggaggtggctgcagcagccagccccgggcccgggggccaggactggacaggggcggctttctccacattcccttttctgccgtccttcaggccagtagccttgctgcctgcaacgttttggcagcctaactggcctccctttccgcacactcctcatctgcccctcaggaattccctgaactatagtcagggacgtatccagaggacaagcctggccataaaacccttcgggggctcccctgcgccacaggaagcaggcccaacttaggcaggacacagaagggctggcgggatctagcccctgagaactgcctccacgctgttc

SEQ ID NO: 71244 - DNA, 1367 bp, Homo sapiens
tgggggcactagtgcaggggtactaggcgtgtgtgtgcacggatgtcagagtcaggctctgtgcaaatgcgggcacacatgaccttgacctgcagatctggggaggggaggctgtgcgggtacttcctgcctttcaactgtgagcaattaattctcttgcccagaaggaaaaaaacactccctcagctccccgcccccttctcccagtaccaaggcccttctcgaacacgtcgtcgtgtgtgtctgcaggacctggggcttcaaggcctgggagctagccagacccaggacctggacttccagcagctggtctcggaagtaccgatgttcgagtcctccagcgagactagagagcctgcgcccctgcccacagcgcgtacagccgcacccacactccaacctgctcctggtcgggagactcacacgtcccaccgctgcctcaggccaaggggaaccagggagccccgcctctcactagctggccccaacacatcttgcccctccatccgagccctgactggtccccaaaggtccctccacccagcagagccagccacagggctcaggcaggcaggaaaggcctcagccggtgccttcaaacgctctcttcactccttttttcactccagagctattcctaggatgccccattcagcccgtactttagggcctgagtgttgggccctggcttttagggcacttgtttggcatttaaggccctgaacgcaactgccccctgctgctccgtctatccttcgctccattgttccccttcaaagcatccaaaagccaggcagcccgcagaaggcgcggacctgcccgcatggggacggaggctcagcggccgacaggcatcgggcccgccggggacggacggcagagggcgggccgggtcccatgggcctggccggggcggaaggagggcgccgcgggcgccgtgggagcctgggacacctcccttccaccggtgccggggcgcggccgacgcagtgcgcaagcccgcccttcccccgcaccctgcgcgcgagcccagtgccgccggaccaatcagagcctgggaacgaacctcgccgcgggcttgcgaaccggaagacactgccgccaggcgcggggcgggacaggactccgcctccggcccatacaaagggaagcccacgtcttaagccaatcaacacagcctcgcccgagccgggaagcggagagctgtgggcgtgcgcagacgcgcctttccggccccggccccgccctgccgcgctctgggctccgcttccacagctgccggctgcctgctggtcacgtgcgaggcgccagccaaagagaaccgagctccaggcctgtgtggcgagttttcaacccggcggaggagc

SEQ ID NO: 71245 - DNA, 3548 bp, Homo sapiens
aggcgcaggagaagggagggagggagggaggggagctctgcctgcgccaaggggacacatccgcccgccccagccccagccccagcccgctgggtaacggtgtgggtctgaagtcaccaccgctggcgacagcccctctccctcaccagtcggactaggggctttcttttaactaacgaaaaccaatcctcaaacacgggagagacaagggaacggggagaagatcagagaaaagcactgaagcccggcacagcaaaggggaggggcaagccgatcagtggggagggagggggaggaggggagaagggggagggggacggggagaggggagaaggacgggtaagggaggaggggagagagagagggaagggtagagggtgagggaggagatggagggagggaggagagggagggagcagatggagggagggaggaaagaggagggagagggaggagatggagggagggaaagagccgaagacccagcgggctttgcactcacccgtgttgtacacgtgcagttcgtccactattccctcgttgccgccgccaaacaccacgatgagctccttgatggccacggcgcggtggccgtggcggggccgtggcaccggacccgaccagcccaccactcgcttccagcggggctgcagaagcaccgctggcaagttggcgggcgacacggccgaagccatagttccgggaaagggtgcggtggggagaagtcaacaagcgggaagggagcccctcaattcctttcacacaccccctttcgtctaaggcagctctcacggagaagcggtttctcacacagcggtagacgactccatggaggccgccatcttaactgccctccttccctttggctcttccctttcttctcgctcaccccgtctccgcaagagccgcccgaaactgtcgagcgcctaggctcaagaagctggaggccgctgagtcccgtcgccccgactacttgtccgggcgctcccgcttacaagctcgggcgggaggccctgggagccgccatcttgagccgcctctctctcctcccttcctcagtcgtagccctcccccgccggaaatggcggagccccggcccggttcccacacccccaagtccccagcactggccggcttccggggcgggtggaaaggagccacaagcgccgcggtcgtcgcagccccgccggcgctcagaccacaattgtgggagccgccatcttgagaccgtcccgcttccccgcccagcgccttagtgcagccgccgctcccgaaacagcctcgacacacctaacgaatggaggcgggccggaggccggtggaaccagctcgagctctcgagggccgtttgggggctcgcgccgtacggcttgtgaagtctcgcgcctctccccttagtccgcctctgctgctcaggctgcgcctgccgccgtgggagccgccatcttgagactagctccccgttcccccctattctcttcctcctaggtcagttcttccactgcacaccaaactcaaggcggtgtccgatcctcacttcccgccttatgactccttcccacaggagccgcttcaaagagctagagttaggccccgaagcggcaactgtacggcagaagaagcggtaacggcagggcgctcatgcctcctccctgggagccgccatcttgtgtgaagaagtaacaactaaacatggcggcagcggcgccggcggtcgggcgaggaggcggagccgggtgacgtcaccgcttccccccactcgccctcgcaccgcttcgcccctgggcccaagcctcttaaaggacccctgcgctgcctcgcggcgggggtgggggtcggcgctgccgcgcgctgggctaaagctcgagtcgcgctcagatcaggtgcaggcgcaggcgcgccccgccccacggcccccccaccgggcgagcctccacgcctccgccctgggagccgccatcttgccacttcccctcgcccggccgtccgcgggcgtcaatagcgactttcagcacaaaacaaagatggcggcggcggcatctcggaaatgcccggatgagactgctaacccctccgacgcgctcggccccgcccccttgggaacggtctctcgggttgataagggacgcacgcccgaagaactgcctttaaccagcactggggacagcggcacgcaggtggccggggttggcgaacagccactgcagccgcgcctgcggccgggaagcgagcattttcgcgccctgcacacccagcagccgcaggaggcggcccgaggcgcgccgcgggggagccgggggcggggcgacagtgggaggcgacgcagccgagcgccggcgcccgggggtggagcctccgcccgctcccaggctcccaggctgcggggcccgccctcgggcgccaccgcctccgcccgcgccgcagcaaaatgagccgggccgcgcgccccagaccgccgcgcgctcggccgcccccactgccgagaggcccgcagtcgggccggtggcgcacgagccgggcgggcgaccgcgggaggcgtccgcgtcatctcgcgtcacctcgccccgcccgcttcccaggcttcgagtcccgccctgcgcgcaggcgcaccggcgctgctcggatcctcccttttcggagatttgaatttcccccagcgaggcgagtgaggcgaaatacccgtatggtgatagctggccttttcgcgccaatactgtaagtgctcaccgcagccctgggaggtgggtcccggcctcgcccccacgtttcgcctcctctaggaggccgcccgggcgcggcggcggcggcggcggcggcggcatccgccctgccacgcgcaggccgcagcgcggggacccaagctgctgcccgggagcggcagtcgccagtagaaatggacagaccggtcctgtcagagcctgtggcttttgttgtaaacgtctagaagttcagttaaattacaagatctaccagatctaccggcgggcagaattattactttgaagttactgaagttatgcgtcctgctggaagaccttgtaatttaatgcgttagtaaagaagcacacgtcaccctctcacacattttcaacaatatttttaaagtcgcctctcaacatattacatgtattttgtaatcgtctgtgttttagttcatgcagttggaagtatccatttgagaagggacaaagagaagaattcttgcctgtctgtgccaccacctgctctttgtgaccttggctagttacctcacatatgtccccaagtcccccacccatggtaaataagaaaactaaggcctgatgcgttggctcatgcctgtaatcccaacactttggaaggctgaggtgggaggattgcttgagcctagccggggcaacatagcgagacccggaggcatggtggcacacgcctgtggtcccaggtacttggaacgctgaggtgggaggatggcttgagccagggagttcagggctgcagtgagctgagatcgcgccactgctccagcctgggcgacagagcaagaccctgtctcaaaaacacacaca

SEQ ID NO: 71246 - DNA, 2071 bp, Homo sapiens
tctccccaccacagctgcctcccagctgacccagcttggctgactggggctctgcgctacatcaaaggctgaattccttcctccttgtctcgaatcttccctggggggcaggggacacctaccttggtagaagaaggggctggagatggcggtggaggccacagggaagcagggcttgggaccaggccgagctcaggccctgaatgggtctgggagcctggaaaagcttcataaagacaccagtgagaggcaggcagagaccagcagcagggtctacagccgtggccgtggtcaaggtgggctcttctttgggtccaccgagcctaacaaccgggccctcttacctggggagaggaaggtggaggctgaggatggcaacttccgggggctccaggcctcggcctcggcgggtgcagggatgctgctgggcctcggggcagtggtgcctggggacggaagcggggcgggagggtgccctgggacgccaaggaaggaaaggaaggttgaggcccgggtgggggagccccgtggggcccgccggcctcccagccgtggggtgcccggagtcccgcgctcacaggctgtgatgatgtcccgcgcacggagcagctgcaggtgcgtgaggatgtgcacgaggtcggccacacgggcgttgcggttgatccagggccacaggacgctggccgtgcgctgcccggagcgctcgcacagccgcagctcggtctggtcgcgcacgatcagggcggctgcggggcggggggcgtcaggcgtcggcgccaggagcccgcgcgcctcccgccccccggcagcccgccgccacccaccgaactggcaccagtcggcgggctccagggcgtccatcactttgtagaagcggcacatgacccagggcggcacctcgtacaagaagtgctgggcgccgggggctgcgggctcccccgggcccggccccccggccatggctgccgccgccgggccgggacctgccggggcctctcagggccgcggcgggcgcgggcctgggccggccgggtccgcggacactgactcacttccccttcgagccggcctcgtgcgacgcccggcggggcggaaggggcggtgcccgggcccgccgccatcttgcgcgccgcggccgcgcgctgggtcacacgggggcgccccgcgccggggagggcccgggtcccggcgggttccgcgagcggcgatcggcctcccgggctcgcccgggcggggctctggaggacgaacggcggctcccggcgttggggacagagggcagggcggaggcccgggctgctcggaaaggggccggggccgggccttccgaaagctcctgggcggccctgccggaaccctgctctccactgcggcctgcagggctgttaccaggagccctgcctgcccgccccacgtctagccccctgcacacggcagcagccttgagccattcagtctccttaggtgtcctgaaatatgccgagaacgctgcccgccacagccgtgagtgtatgcgttgctgctgccccagccctcatttggcaagggtgagctcaggcagctgtggtgaaggcttcctgagcccgccggcagagctcctgccaccccgtacctgtcccctcctgggcatcgtccttgattacttgtctggaccgccacccccggtccccgccctgagatggggaagaccccacaagcagcaacgcagacttactcttttgtttctccagctggatgtctcctccagcgacagttccccttgccctcttgatcctgacagcgaaggggttccccacccctagccctacagacttaggacttttcctagaaacgagaagtgcccaaggcccacagctggcccctgttggagtctctttcctgaagccaccaccactgtggccactcccaaggaagatgccaaccataccatgaaacccatggcttctcacgggacagactttactgagatgtaccaactcaagtatctgaaatgactgcacacccatgctaacctccacgggggcacttggtcctacttacacacaaaggcccatcagctcacggaacaggg

SEQ ID NO: 71247 - DNA, 1006 bp, Homo sapiens
cgtgcttcttctgatggctggagaccttcgaccgtaagcttctagcaaggagaggctagctcagtgctgaaaaaaaggtgggctctgaattggtgaataaacaaatgatgagtttgggacatatcagtagtccgttggacactggtggcttggagatggcggaagatgaggtggaggaagtcactgaggagggcctcagtgccccagggacagtagcatggaggatggttacgccagaggatggatcgacttctagccatgtggtggtcaggtatgcagacacctctcctgctgaaacaactacaactgccaaactgagtatcttacagaagctgctagagaagccacccacaagctggcaagaaaggaaggaatacacaggctgaagagcaaataaaagtacggggcccttttctgtggagaaatctggcaggcaccaccttaacacacgaccaaactgagctcaggcccctcagtgctgctgagatgaaccagcatcacgagtaggagactgaagcttaccgtgaggagacagcaggaagagtccagagagggcgtgccatgcaaccacggtctggactcaagatgatgagagaaaacaagggggtgggggaacatttctgataaaggagactgaagggatgacacaatcgaatacaacacacagtcctggactctgcattccaggctcaaaggctctaaaaaaggcatttatggggtatgtggagaaatgtaaggttctgtgttagctcattgctaaacttcctgagtgtcttaactgtactgtctgctcttaggaaaggcatgcttaaacgtttaggagtgaaacagcacgaggactatgactaactctcaagtgatcaatgggctaggggaaatacagtgccaatatggtaacatgtttaaaagaagggagatgacatcaatataatcagaagctatgccaactgacagtaatattttgaagcagtggtaggcaagctttttaacaattaaagagaatgcc

SEQ ID NO: 71248 - DNA, 853 bp, Homo sapiens
aatgtataaactataacatgaacaactttatgctagtcagacaaaatggacaaattcctagaaaaaaaaatttaacagcttacagtagcccaagcaggtgcagggaaaataaaaataggtttagatgtgtctgcgtgtacatagaacacctcaaaagacacagacaagaccctggatgcagccgttccctgaagagaggcctaggcagctgggagaccagggcagcagggacactcagaccttgcatcactctggagtttgcacttcctgaattgtgaagcatgcacatgtctcacttatgcaacagtgaatccaaacgtgcctgtatacaaggaaaggcctcacctggctgcgccgtggaggctggcctggcgtgtggagcaggcagaacattagcaagctaccgagcaggtgcaggtatgaacatcagctgacgctggctctttgctttctttttaatcttgacaaatttggtaggtgaaaaggcatcatttttgttctcgtttgcatctctttgattaccagcaggcagaactcttttcctatcttcattggccatctgtatctcttcttttatgaatttcctgttcatagtctttgttcattagtggtgactagtggtaagttagcaataagaactgtttgcattcaagtctagactgagaaggaaattaaaaaatctgcccatgtattctcacaataaatgactactgactagcctgagataattgtacccactgcccagtcacaggcattaagcctaggatgattcatttcagacttgtccctgaccttcctcataccctttccagaagggccccttgagctgctatgatactcctaaatcactatc

SEQ ID NO: 71249 - DNA, 1276 bp, Homo sapiens
ccaaagaacctctgagcaccctggggacacgctcgcaccttagagcctctggcgccgaagagcctcgggtgctgctggacgcacagtcccctacccacggctcctgatgggaactataaccacctctttatgatgagttgtgggacccagaacacaatgtctagtcccttttgtggataataatccccacctacttgttcctgctagatggggaaaggagccggtggacctactcgctcgcgggggggtagcggggggcagaaattcatggaatgggcgagaaggagggggaggcaaagcccagagatgggggtgagagctcaggagcccttgtggcgcactctcccgacgggaggcgaagtgcgcacgcgcgccggtgggggggccgagtaacgggagagggggcgcgcgagggagggagggggagagcgcgatccagggagaggccggggccgcgggcgcgcgacggcgccgcggcccaaagccccgagaagggcaggagcgcgcgcagccccgacaggcgaaccccggcgacaggggcgcccgcggggccgggggccgggatgcgcgtcgagggcgggaggaagaggggcgtcaggcgaaggcggctccagggaggccgcgccgaggacggtcacccgcgagcacgggtgacgggccgaggggagagtcgccaccggcggcggcgggagggggagggtagagaggagggacgccatccgccagccgtgtcgtccgaccccgcgggcccctcccgcgccacgtcccgcccctgacccccgccccccggcaagggtccccgcccgcggccacggcggtcccactcacagtctctcctcctcgcctcctcctcctcctccgctcggcgcggcggcggcggcggcggccattttccggacggcttttaccacagccctctctccgagaggagggagcgcgcgcgccgccgacgccgggaccccgcacggccgacgtcgcgccccgccctcttggccggcccgcgcgctgctgcacctgcgcgcccgcgccccgccctcggcgccgctgcgagcccgcccgtcattggctgtgatggccgggctgggacggggaggacgggggaggggggaggtctcagcggcgatgccgtcaattggcgagatttcctgtccatttcggccagggaaaagggggcggacccctccagctgttgattggctgctttcggccgtcgtttggggaaaagaggcggcttgggcgcggagggactggtttagtgggcggaatttgaatgtta

SEQ ID NO: 71250 - DNA, 491 bp, Homo sapiens
gggacccttgcctgcctgccttcctgccacatctgctcagtgaccagtcccatctgctctacctcctccaagtcccccacctggctgcactgtcacctgaggctcttccaaaaacacctacacacttgcaccacctctgcactctggtcctcactttgggcctccagtttcctttcccggccctcaaacaggacactgccctcctgacccctggctccaggcatgcaaacactcacctttgggcccttgcactttgacctgcaatggggccacaccagccttgcttgtgtccacctggaaggactgagggaggttggcacgaaccatgcctgggctcaggccgggcccagagcacttgaccttggacgcatctgtcacatcatgcacagggaccttgaaaggactgcctgagggttggggcaaagggatggcggctgtatgagacagggtggggacgagcagacagtcccagccctgccctggccgccacc

SEQ ID NO: 71251 - DNA, 2382 bp, Homo sapiens
gacaccccctcttggccagtggtaggatgtggatgaggccctctctgcccagggtcccagggggtgttcagaggtgaaggagactttggggtgagggcagatacacacagacacacacacacgatgccagcagggtatgattactgccagaagccctgggcccagaggaagggcagagggcagacccagcctgcagatgggcagctctggagaacagctggacagtgtccacagctgccagagcaggggtccgccacacacctcaggggcctatggggaaccaggaggaggaggctgactccagctggcccagaatccagggcccatgacctggagtggggctggggctgaggaagaggaaggtgggtggccctgggtggttgggaaatacaactgttgttccagggtgggtggggtgaggcaggggaagtgggggagttgggcaaacgccctttgggtgagggattgtgacccccgccaccacccccacttcctctaccacctcgaagactcaagcttggagttgggaggccacaggcctagccaggggaggggcccagagcccaaaggaaccagcagttgggccacatggccctgactcactggggcccatcgggagatgccggggtggcagcaggagacactgggaacccccttgccacccactgcctgacccacttgccacctaacgggcctctgggcctcggcaggctcgccacaggggaagtggttagggcgggtccctgacaccccccatcaccatggcaaccctgctgggctctgggccccacccaaggctacttctgggtctcaggctcaaggcaggatggctcatctttagaagccctgtcagcctcccccataatcagacaaaatacttctctggtgagtcaactagggggcgggcctatgaggaggggctgggctgtccatggcagctgcttcccagcccagcaggcagcacctggagggccaggtgagccgctcagagtggcctccccagttcccaggttggtcctggccccacgaggctgcctttcactctccccaaatggcagcagggagggggactcggagaggaccaagggtgcagggccagggaacaaggccagccagggcttcccatcaggcccccaccccagtccagcctcagacccctcaacgacccccacacggggagcaaccaggcccaccaggtccatgttaggccagcctactccgtccccatccccctcccaaaagagagagggaaggaccagggcccagggctgggagactgtctggctggatggccccgccccatcccacccccctttccccagcccctgggccagccaacccctccctcccctaatcactgctgctttccaacatttttttgccttatatggcaaagctctgggaactaggcctgctccagccagctcacaaggaggaggggagctgggaggagggaggagaccccccctaaagagctggggtgtggcccgcctccccacatccggtcgccccccctaccatccaggactgagatgactcagcttggctagactgaggctgggacttgtgggggtgggcctgcccctcgcctcaactggcattccaaagaaagaactttggttcttgggatctgccctctgagtggctgggggaacccaagtcttggtccctcactttcttgggttcagcaagggccattccagggctgcagggtaactggaaggcctctcaattctgaagaagagaagactcatcatccctctcctctccctgttccacatcacccccgagtcacccattctggggcctgccctctcatgcagcccctatcttgagaacgaattgggctgctgcagcaggcctggtcaatgccagcctctccagtccagtgacacagacactgggctggcacaatgcacgctggagcatctaccaaccaactcctgcgtgctacacgcagaaaagcaaggcctacatggaagcaagagtttggcccaagatgaagagaaaagttggcgtccaagtagtctacaagccaggtctctcagtcaaccacgcccaactcaccccgggtgcagttttgctaactatgcttctttctggcccccaggttgcctgtgtgtgtgtgggggggtagatctaaactggtggttggagccatctccgatgggcgacccatcctccagggacacaaagagcccagagccccagacaatgggacgcacgagctccaacccacacttcagaaccaacgggcctctgaaggccagagggccctctctaaacagctgtggggggagagcccgggcctcctcctcctcggggacggggcgcagggccaggagcctgcccagtgcccgaccccccaggcccactcccacc

SEQ ID NO: 71252 - DNA, 755 bp, Homo sapiens
ccgagagtgggagctactcattttgaggcgcgagaagccgggggggcggtgctgcagcctcggcgaggggacggccctttaattaaagtcgcaggcacctaggcgcgcgggaggcgaggcagggagcagaggttgcgctgcggagagagcgagccctttaaatgcgggaggagggcggggccagagggcgggcctcctgcggggaggggccgtggggtggggcttcgagggcgcgcctgccccaccccgccccgcccgttggaatgcccccactaggcccccgggttcggctgatcagacgcgaaacccgggctccagggtgggtcgctgggcagtggggtgggcaaggatgctcccagccccgcagcctcgcgttggcgctgcaggaaacgcgccctagagcgaggaaaggctgagcagtgtctggcgcgggactgcttggcctgcagccggcgcgccttacaagggactttccttccccagggcccctgcggggggtggggtggctctcttccctaagtcacttgggctctgccccgtccctgcacatccctaccccccgccgtcatcccccttccccgggcccccagggcctagggttccccggcggcatccccgtccgccggcccggcagcggcgggaaggggccaaccctaagagcgaacccctggagagcggcagccccggaccaggcactgccgagggcgctttgtgtgctcatcacctgggaagcggctgcagggcaaggcctgcgc

SEQ ID NO: 71253 - DNA, 2761 bp, Homo sapiens
ggaggtggaggctacagagagccaagattgcaccactgcactccagcctgggtgacagagcgagactgtctcaaaaaaaaaaaaaaaaaaaaaagaatatgaatgatgaatgtcacctcctttctcttctccatgagacagccaatatctgatcaaggccctgggaatgggaatccatagctcgccacccacgtctgccccctgcctagccacgctgcgctcagggaccattccgacaggagaggacgccccacttcagctccccccagtgccccgggtgaatgaacggcatgaagggttaggcgggcacacgtcgtctctgcacgcatcgcacggcgccctctgcccgcgcccactggcgtgcccgtcggcatgcccgggccccttcgaagactgcttgcttctggagtgccagcggcctcctggcccagtgccccatttcctcccgggtggagcgagggaggaggaagggaagcagaggggtaggcggtggtaagcagcaggcacatgtgcgcgggcgagagccccgcagactgggaaggcgggcccatggcagggggtctgcggggatcgcgtaggcgcgggccttgccctgcagccgcttcccgggcgatgcgcacacaaagcgccctcggcagcgcctggcccggggcccgcgctctcttagggtccgggcccttcccgccgctgctggggcggccgaccgggatgcggccggggaaccctaggctctggggccctgggaagggggacgacggcggggagtagggatgtgcagggatcgggcgaagcccaagcgacttagggaccagagccaccccaagcgccgacttcgcccgctcgcacgtcccgggtccctcgcgcgcaggccccgcccctctcaccccgccgcacgccacagggtgacgtctgggctcccagccgcatcgccctgactcccgcgcgggccccgccccctgccgctagccaatctgtgcgtttgtgacttttgggcccgcagccccgcctgctcccacagcgataccggtttgcattgccctgactcccgcgcgggccccgccccctacgccgctagccaatccatgcattagtggcgtccgggctcgcagtaccgctcgctcccaccgcgagaccttctgctccgcgcccgcgcgggcccctccccctccatcgctagccaatccccgttttgtgacgtatgggctcgcggccccgctcgctcccaccgcgagaccttttgctccgcgcccgcgcgggccccgccccctccatcactagccaatccccgtgcttgtgacatatgggcttgcggccccgcccgctcccatcgcgagaccggttcccaccgccctgactcccgggcgggccccgccctctccgccgctagccaatcctcgcgttgatgacgtttgggctcgcggccccagcctcccagctctcagggcacggccggtctgtgccggctgctcccgcggttaggtcccgccccgcgcagcgcgcgcagcctgcggagccagcggccgtgacgcgacaacgattcggctgtgacgcgacaacgattcggctgtgacgcgagcgcggccgctcccgatgcgctcgtgccgcccccgccgtgctcctcggcagccgttgctcggccggttttggtaggcccgggccgccgccaggcctccgcctgagcccgcacccgccatggacaactacgcagatctttcggataccgagctgaccaccttgctgcgccggtacaacatcccgcacgggcctgtagtaggtacgcggcggcgggcgggaccccttccgggccccctcctcgtgctccgcctcgcgacctccccgctgccctccccgcgcgccttccccggcccgcggccctgaccgccccgtgtccggccaggatcaactcgtaggctttacgagaagaagatcttcgagtacgagacccagaggcggcggctctcgccccccagctcgtccgccgcctcctcttatagcttctctggtgagagcctcgcctgtggggacagcctgggacgcggggaggatggggtcgcgagggtgtggcaggggggccggtcgagagcggcactggagaaaggggagggaagtctgggggggcaaacagttctgtctcctcctttcaatccagacttgaattcgactagaggggatgcagatatgtatgatcttcccaagaaagaggacgctttactctaccagagcaagggtaaggcaggggttgggtgggcacgctggcaccttcacccgacttcgtcagggaccccgctcacagggaggacctgagacctcagtcccaaccactccagcagccttaggagggagaaactgttacaggtcccgaaatgggattcagattagggccatcaggccaggcggggcacaccgatgccccctctgctaccgctgccccccttcccaaggctacaatgacgactactatgaagagagctacttcaccaccaggacttatggggagcccgagtctgccggcccgtccagggctgtccgccagtcagtgacttcattcccagatgctgacgctttccatcaccaggtgagctggctggcaggcgtcctgtacttgggtacaacctaggggatcgcggctgtgtttggataaatccaggggggcactgggtacaaatggtggctcttgggcctccggggagactctgtgtgactagagcaccctggtctgggatctaggctcagactcttcctgagagtcctgggggcaaaa

SEQ ID NO: 71254 - DNA, 3411 bp, Homo sapiens
cctcagcctccgaagcagctgggattacaggcaccagccagcatgcccagctaatttttgtatttttagtagagacggggtttcaccatgttggccaggctggtctcgatctgctgacctcatgatccgcccgcctcggcctcccaaagtgctggaattacaggcgtgagccactgcgcccagccaatttttagtttttaatttttgtagaggcggtttttcgccatgttgtccaggtctcaaattcctgggctcaagtgatccgcccacctccgcccctcaaagtgctgagatcacaggcgtgagccacggcactccgccgcaattcctgacttgtactgccccagtggtgttacagcctcgaacccagtttccagacctaagtcaccgccggcatccagagtcccatgatggaaagggaggctaggttcccctgggaaggaccttgcaccactgctgcaagtgcaccccagaaatcgtcccaagcttttctcaaagggacctgcagccatttataaaagcgacatatcatcctggaaaacaggtgcgctcgagcaggatttcctcccgtccttcctgtcaaaggacgggaagactttgttaccccaccgcgccccacctgcagaatggtggacagatacctccagatgccacttcccccaggacgcccgcctgctctgcgcacctctccccggatgctgccccgtgggcgggtgggggcggccctgcttccccacgacccccagacgcacccggagggactcttgagcacagtggagtgggaagggcgaggtggggcggtgcccaggcgagagcggctcatgggaggcggcgcccgagacgcagctggtcgggacggtgcgggtcagggtgggcggagcggggctagagatgccccggggtttcccaggccatgagtctccgtggagatttctcctcgacctcttccccgcggcaatgtgcgaaccctgggtctccaggaaacggggatacggggcatggctcccagcaaggcctggtccagcctctccggtaggggaatgggtctccccctccggcctcccgggttgacaaaggaacgcgggcccagatccccgtatggcgcttcaccgccggggcctctagcctagaaggaggcacggagcgcgtgtccgagacccgtgcaagctcagggacactctcgcggtcgccgggaggcccacctagggtactttccttttttccactctcagaaatatacgtctgtcacagttaacggcaaagcctagggcaagagttctacgcccaagatggccagccggaagcgggcttctcgcgaccatgtggcgaagccccattcgtcagctggccgcccgcggccctggtacccggtcacctctctgatctgcgcatgtgctgggctacgcccgggcgcaagcgccaagagcggctgcgtctatggtcatgacgtctgacagagcgtccacccgtcttcgacaggactctatggttcttacgcgcgcagacagaccgcctatataagccatgcgcaggcggaggagcgcctctttcccttcggtgtggtgagtaagcgcagttgtcgtctcttgcggtgccgttgctggttctcacaccttttaggtctgttctcgtcttccgttccgactctctctttttcgttgcagccactgaagatcctggtgtcgccatgggccgccgccccgcccgttggtgagtcttgaatccgtgtactttcactgctgggaaacgggcggggaaagaagtgcctatggccgctgaaaacaattgtggggtggagcctcccccgtgcggcggccctgtcttgggaactgaccctatgttttacacctcccggctattttttagtctgcaatattactgtctgttccttcgttcccgtgtcggtgtggaagcgacggttccctcgtatctctgcctgtgtcctgcaagctcaccgcattttcgggcgctagatacgctcttggggcctttgtgtgcgttctctgtcttatttccgggcgacgtgccgcgtgcgttgtcggacgtgaagggcagtccgggaaaaacgggtgcggccgcctcctgtgtcctacagggggcgccagacgcatttccactcggcttggaggtggatttagtgccacgtgcccgaaagtcttaaattgggtgacctgagctgtgcaatgataatgcggcgattttgtagtacgcagtgtcttgaagagagaatttttaactaggaaagtttgttgcaaagtgtttataggaagcgtaagacaaagtaacggaagatggtgtctgttgtttctagtcttgggtgttgtctgtgttgcagcagccaactgttgctttgtagtttatttccccgaatggaaacggtttagaagtggacgtgcattccccacccttttcccgtccctcgtttgggttgttccttgaggggcaaagtgcctgttgggctttctgtgaacctcacctaacctgtgttttttcactcccctgcagttaccggtattgtaagaacaagccgtacccaaagtctcgcttctgccgaggtgtccctggtaagtagtggaagagcccctgcactggttggctctgcggactccgcgtccgtctgtgacaccccctgcacacttacccaatccttttagatgccaagattcgcatttttgacctggggcggaaaaaggcaaaagtggatgagtttccgctttgtggccacatggtgtcagatgaatatgagcagctgtcctctgaaggtaaggcaggattctttgttcgtcaccccccagtccttcctccgtgctccctcaaccccacccacatacactgcactggaattgggagttgatgaaacatgagccttacaaaactcagccaacacagttcccctgagctggagatagtcgtggtgaatgtttctctattatcttctctcactttgctgcttttcttctccctacctagccctggaggctgcccgaatttgtgccaataagtacatggtaaaaagttgtggcaaagatggcttccatatccgggtgcggctccaccccttccacgtcatccgcatcaacaagatgttgtcctgtgctggggctgacaggtgagcttggtctgggccttttaaggcagttggagtctctacattattaggcttgcattattttatcagagcatagaggtggccccagtgactcagccactatggctactagaaaagccaggctggcaagtgactttcagtggtcactcaggaccccttcctgcagatacaaacaaagcatgagtaagtcttagcaagctcttccccacaggttaggggaaacactggtgatgggagtagctcttcttgcttttagctgaatgacaaccatcttgccagcaggtagctgaagctggcagagg

SEQ ID NO: 71255 - DNA, 1101 bp, Homo sapiens
ctgtccctcttgtctcgtcctagtcggtctagctgggccccatcccctttcccactcggagcgtgagcgcctggagacacgtacagccaaccagtgagaaggagtggccgcgagtggcatgcacttggtccaattacctgcggccctgccggtcggcccgcgctggggccaatggaggtgcgaggcggggctcgggcgggggcaacggtcacctgatctgcggctgtcgaggccgctgaggcagtggaggctgaggctatgatggcggccatggcgacggctcgagtgcggatggggccgcgatgcgcccaggcgctctggcgcatgccgtggctgccggtgtttttgtcgttggcggcggcggcggcggcggcagcggcggagcagcaggtcccgctggtgctgtggtcgagtgaccggtgagcgggccggggtgggatgcgctgtggcggctgaggcgccctcgcccgactccggcgctgtcctaggcgaggggtggtgaggcccggaggtggactgttccttgctcgggggctcgcagcgaatctgccggcgacagagctccagtccacatgcgcccccgtctgacagcacctcttctgtgccctgccagggacttgtgggctcctgcggccgacactcatgaaggccacatcaccagcgacttgcagctctctacctacttagatcccgccctggagctgggtcccaggaatgtgctgctgttcctgcaggacaaggtgcgcccgccccagcccactctcccccggtcatcgggaggcagccaggccccctccccccatgacactgacgcccattccccaagggaagcttcagtgaccttgtcccaactgtagggaggtgtgggtcgtctcatgggaaggcctgtagtaaacgcttcagtgggcatggcgacagcctcggaaatggcaccaacttgattggaggaagcgacggaccagaggccaggtacctactgagtaccaagcactttggatatctgacttagtccaatatggtgggtggggattatcgtccctgtttgtttatagatgagaagactgaggctggaggttaagtgacttgtccaagctcatacag

SEQ ID NO: 71256 - DNA, 1313 bp, Homo sapiens
caagctgggccctaaccgctcagggtagggaggggcggtcgggccgagtcccggtgcgcttcggcgtctcaggaggccgtcgtgacaatggcagccttcgcgtcgtgagggggccgccccaggctgccgcagcggcgcgcgcccggccgcggggccgcgccgagactcccgggggggtgggcgggggtggggaggtgggcgggcgcgcgcggggcggggcggggcggggcgcggcgggtggggcggggcgcgcgcggctcccgcgcacggattcttcctgggccgcagcaccggccgccggcccgccccgcccgccccgccccgcgcctctctagactctcggcgagcagcgtcgcccgcggagccgcgctggtgctgtggcccgggccctggcagccctcccgggaggcgagccggggaggcggtggcccctgccggttgcggcggggcgcgggaagaggcgggactctttgacgcggcggaggggtcgggcgacggccgacgcgccgccatctttggtccagtgcggtggcggcggcggcggtggcggcggcgactgctgcggtgaaggaggaggaggagccgagcgggcgctggcaccgaggcctgaccatggacgaggaatacgatgtgatcgtgctggggaccggtctcaccgtaagtgcggccccggcgcccctggccctgcgtcgtgccctcgccatcccccgcgatgatgcggccgccggcccatcctctggtcactgccatcttctgcgctccgctccccgaaaagccggcgccgtgcccaccccgctgctcccccagcgacgtcgcctctgctcgttgccatgaccccatctccccgaagaggcccccttcctggccgcctcctgggctacccgggtccgacccccggcgccctcccatcttccctacccctgcccgctggaccggaaaacgcacccccactcggcccgatgcccacgaccccgcccacccatcgcccccacccatcacggcatccacccgtcgcccgcacccattgcccgcctagcgttgcctctcagcgtcccttcccatcttgcgctaatcccggtggggatgaagtagaaggacctggggtcagggggcctcgccagagtgggccctcagcccgcctcctcatcgtcttctggggccaggggatccagggaatgttccagaaggaacagcagtgggggcagtaagcacattcccgcaaccccacctcggttgcccatggagacctcaggctgggtagcatctgcagcctttgtccttgggctagtgacagtgactggtgagggtgttta

SEQ ID NO: 71257 - DNA, 1408 bp, Homo sapiens
gaggaattagagggaccggggcccagccttggctcgggttaacgtcgaggcagcgcgaggggctggggaattcagcctccggggtccacaggagccggcggcgggggctggggcgggagtccacgcaggaccaggggcggtctccggcggggcggggcgggcggtggtcacgctccgggccagctggcgcgcggcggggcggggcatccgtgcgtctcctggtggctgacgtcacggcgcgggcgtcagctgactgttcggccgccaccgccgctgccgctgccgctgtcgctgtcgccgccgccgccgcccgccgccgccgccgccgccgccgccgctgccatggctcaatacaagggcgccgcgagcgaggccggccgcgccatgcacctgatgaagaagcgggagaagcagcgcgagcagatggagcagatgaagcagcgcatcgcggaggtgcgagccggggagcctcggagcatgcgcgctgcccaggtcccctggcggccccgcgccacgctccggccctggaagccctggggcggtggccacggagcgcgggcggcgcgccggggcaggcccctggctcgctgacttccagcagggcacacagaagcaagccagcgacagtctcatctgtgaaatgggcctggagccgggcgttctccgaggctgaggccactagctgatgaccggcctccggcaggagggagccgagccagtgtttctgttgggaggcacggcggggacgggcctctcgtcgcctcgcctgggcacccagcgtcctggctctggcccctcggccctcagagccaggcctctgccccctcggccctcagagccaggcctctgccctggtcctatggacaccgggcagggcggttcgtctccccctggagaggcggggaggcctgagccagacctggcaagtccactggccaggaggctccttccagaaccccttgcacctgtgaggcaggcacgaccctcccgggtgccagcggttcacccactgcttccgtgagtggcctgtgatggtggtggtcagggaaggagcgtggaggagcttgatccttttggggagactcactcatcaggactcggggctccaggggagagcaggctcctgcctggggaactggggaagcctggccagaggagccttgaaacaccaagtcctcatgccctggccgcactgtctgagccggggtgcccagcaagcagaaggtgtatttctctgccagccaccttcttgggagaccactggtcagcgagggcttgacatggtaccaagtgggttggggctggggccaaagagaggcctcctgggaagctgttgatgacattctggggcctggagggaggaaaatcactcagggaggggccaggcccctcaaccactctgttcttg

SEQ ID NO: 71258 - DNA, 1371 bp, Homo sapiens
ggcgctccttagggctcatccttggatgtcccccatgtctccatgggccgcctcccccaaccccgtccctttcagaacttacacgaccaggatcctgccactcactgtgagatccttcccaaccaccctttggtggggctcggcatctggtgccagggacccatgggcgatttccgcctccaagggggtcgggaaaggcacgctgagggtgctgggggtcattcggttaaggtgccatctgatacgatcttgcctatgtctcaggccttcttgctcctctgaagccccctctcaggtcaccctgcctagtgtcacccccttcactccttacctcgcccaggccaccgttagcagagcttctccctccatttcaatgtcttcccctcctccgaccacctctgaccgtatacgccagccccggtccccccctgctaccctttccgtcggccccccgcccgccctcctttccttctccccgagtccagccctcgctccgccgcaagcagcccccagctcggaaaggatacaatatgtgcggccgcattcgtgaccccctggccgcagacgcggcgtctctgcccggacctggcgcgtgcgctgggggagctccaccggccggagctgcggctgtgtccacgcccccgcggcagctgtggccaccccggccatccccgccgtcagcgcctccgcctgcgtctgcatccgcgtcccgcatgaccgccgccgcgccgctccgactccacccccgaagcgcaggtcctacgccccgccctctctgtggctccttcccgaagccccgccccctgcgcacgactccgcccacacgcgcctgcgcaggtccctggagagcctgactggcgcgtggtcagttcccgccaagcggccctgccgggggccttctgagacccggtcagcggttgagaggctgcggtttcctccagaaactctgccctttcgcgcgtaactcgattccagagcgctggtgcaaactgacccacagtcggtccggccccaggaagccaaccctgacggggcttttgaagacaccgtggtcgcctatcccagaggcgcaccccgcgaggctccgcccctaagcgcgccttgtgaccttagcgcgcctgcgctggcggggccttcccccttgtccctggaggccccagtgaggccctgcggtgcctggacggcttcccgccccgtttcttacctggacccaagagccccaggagatgtggcacaacgtccatgttgcgattcgcagagggagggtggccgggtcgggtaacccccaaggatactgctcttgccctcaaccccagtgcccaaccaacggggcttcaccatggactgtgaagcatcggatgtgcattttag

SEQ ID NO: 71259 - DNA, 1108 bp, Homo sapiens
aggatgcccagggttacccttctcaccctctgtagctgttccaggaccctgctggcatctgccgcactgaagtggcgggccaagactttggagatcagctgccagacctgcgggggtggggagtcggccagcctctgggcctcgccttcttctagtagcaccttctccaggggtttgaccactaggttgagcttggagttgggcccgatgctataatccgagagtcgtttcccatctgccaaagacagatcgatgggttcctcctcctccaccgccgtgggggtggcccggggcgcgaggccgcctcgggcggcgggagcggagcgctgcggcatccggctgtgaggcatgcggccgcctcccttggggtcatgtggcgcttggcgcccgcaccccgacccgacacacggctgctggcctcggcccgcgcaccccggtcccgcttcctgcggggctccccgggcgtctcctctccctgggtacctgccagggccttgcccttgaacagcagccgctgctggcgcactgggacgttcagcttctcggagaccagctgcttcagcgtggacaccagctcgtcctctggcacctggccgcgcggagggtgggaggcaagggttgagcccgcggcccccagacggcgaagcccacgcgtccgcccccgagggcagctctcccggctcccggccctcggcccggcctccccgtgcccgccctcggccctgccggtccccctgccaggagcgggcgagagagcgcgccggacccggcggcccggcccggggaccctacctgcaggctgcactcgcggccctgcagcgccttcaccgtcagctgcatggcggtcgcgacggcgtccactcgggccggcgcgcaccccaaccaccccccgccgcgcgccgccgccccgggcgcgcgctggaaccgcccgccgccgccggaagcagcgagaggggcgcgcccgccgcccgcgcttcccggccccgccctcctgccccgtccgcgccccggccccgccccccggcccaattgcgccccgggaggagtccccccggggtcccgcctagcacgcgcgcatcgaccgccctggccggcggacccctcccaa

SEQ ID NO: 71260 - DNA, 1455 bp, Homo sapiens
ttggcctcccgtcatctgagactggggtgaggcagaagtagggagcagaggttaggttaagccaaaggctcatcccggcgagcctcccctatccctagcttaggatgacatggcctctgctggcttgaagttcgggtcacttaccctggaggccttggtccagccatgtgtcttacctctgaagagggaggcaggaaaaccagtggggtgggagaggcaaagtacaggagctaagatgaaggcaccaggactgaagccaccggggtgatacaaaccagctcagaagggaaaggctaggggccatccaccccatgccccatccctccagtagggctggcggctctgagtcactccaagaggggtttggcccagatcccacaccatttctgcttgaggggccgacagagtttgagcagatgcacccacaaggcaggggagggagtcccggcccttccaaaacggccaagtgttcggggtaactggcagtgctaacaggggctcctccctacctgggagtccggaagttgtcggacgggtggctagcagagctcgggcgcgaacctgggagggaggaaaggaagggcacgccgccgtcccacagccggcgacccgctcgggccgtctcggagtctgggggggccccttacgccattcctgggccccgcggccccgccaggcctcgcaaacgcgcggcggcggcggcggcccttccctgccaggcccggccgggcgcccgagtgggcgatcgcggagcagggtcggggccagaggccgcctcccttccggaggctctcacctgccacagccaccgcgcagcttagctgcagcgtctgcctggcaggcagtcgcccgcgagctcggcctgtcagggccccgccccaccgaagcccctcccttccccgccccgcgcgtcagggccccgcccccccctcagcgtccagctcaactccggctgctcgctgggctccgaccggttgtgacgtctctgggagtgacgcgccggcgcgggcgcggtgcgggtgagctggtcggcgcttggcgctgcctggaccaatcgcttggcagcgcatctgaagctgttgtgatcgctggggcgacccgctctgggagggagccccaggcattcccgattacgctgcgacctctaaaggcaatgggacagagggttagacgttagcagggctgggtgcccggggttagggttttggccacgttgccgctcaaggtgcccagccctggggccccagggttgagtttgaccgacctggacgccaggctctgtgcggagttcctcctttcgttcaagtattgaccgagcgcctatttctattttatgtatttattttctgagactgagtcttgctctgtcacccagcccggagtgcagtggcgcgatctcggctcactgcaacctccgcctccctgcaacctccgcctcccgggttcaatccattc

SEQ ID NO: 71261 - DNA, 2082 bp, Homo sapiens
tgtcaatgactttctattttctagttccagccgtggcctctcttgaaaccactccctgccagctggttcctcagtggccagctccacctggatatgtccacaaagttaccaccttagcaagtctgaagtccaattcccgagttgtttctactctccacccagccccaacctatccctccccaaggatcttcatcttacttgtccaggtgacagtagggctgtcatcgggttcatgtcgaagcccacagccacttttgtcacttcccctctaagaccacgcctctccacctggactgcccacctcctctctctcaccactcattttccaaaaagcagctggtctgctacctgcgttgggagatactgactatactaatcctcatgtcatagctcggggagctgacgtcctcagaggtgaaaggatttggttaaggtcaaggaacgagtgtttgtgcagagtcctccatttccaaaaccaaacccagtggttcacccgggcctctccagacacagatgtcgcgacgctgggcctccagccaggtgcccttttcaactccctcccgttcgctgtggaagccacccacctgccaacctcatgtccacttctcctgctgggttgggaccgccggcaagtgcactgtttgggggcaaagcggaaggacaggtttgggtgggggtcaggggcaagcctgtgcgggacccctgctgggggcgggcgcgatcggtgctacgacctgtttgtccagccgcccggccaggcagggctcctcggaaacgcgcggggaaaccctgcctggccaggaggggcctcaggaacccgttggctcacgatcttgcccacaggagcctccggggctgggacgaagatgtggttctcctgggctcgggccgttcctccgggcctgggggctggcgatgcgggccgggccggagatttctctggccgtggggagacgtgggctcggtcagggaggttccctgtcaggcccgccgacccgctccgcccccggagaggacgcaaggccgctgcgcagggtggccaggcaggcccggcaatggcggctaagggcggggccacagcccgccggccccgcccccggcagcagctgcgccgtctggctccacgcaggccccgcctccagacccgcctctaccgctcgcgctggccgccgcatgggaggggcctgaacctgtcccgccccgaacctgtcccgcccctggatccctcgtcggccccacctccgcggtgcgttcaggctgaacccaccggccgccgagtgggaggggcccacgtcggtcccgccccggaagtctcccctcggccctttctcgggtgggagagccctgcctacccaggcttagagggctggggctgcgcttgcaccctgaggtcagatttgtgagtcgtgggaagacgcagatggatctggggcagaattagaacctgttccaaagttgatccatgcgctttgtaaaggcaagggaggtacagaggcgcagatagggaagaccgcaggatccagcgtgagcctctggctgcctttccttagggtctgttttctgtccagaagcgcgttcctgctgtctctcgttatcacttttataatgggacggggcgtctcaaactatttcgacatccttgaaaactcttgcctgctccgcctgcctggtctctaacaccctcctcctcagagctgctcaagctgtgttgtttacgccacaccccaccctaaaagcagaggagaatacaactttcgggggcagtggaggggggagtttagcgctataacccgaggctttcacagcaaaccagaatttattttgaggcctctcaggttcagctttcaagtcacgtgactttcgcgtcctacacaactcttattttcacttgaaaacaagtgtgacgtcgtgaattccctaacaataggaaaaaagaaggctccagaaagagcggtgcttggctttcccagcggctccaagcggtgcccggcacccagctggctgtatggacctggggtggtctccggccgcaggcagacgcggcccttcggcctttctccagtcaccccaattctccctgac

SEQ ID NO: 71262 - DNA, 847 bp, Homo sapiens
tcattcagacgccctcccaggggagtagaggccagaacctcctcgcccccgtggccacctcccgtgccttgtgttcccagatgaccctctggctcaacaccttccgggaagccttcccaccctgggtgccagggtggcattgctggcatgctgccgggggcccgttcccctcctgcctcatgctgggtccccggtgggtctgagtggcctgaaggcctgtaggggagcagggggaggaggcatccaagccatggcttcctcattggttttgaaaatgagaagaggacctttgctttactacccccgcattcaaaaccagccagaggacaagagcctctggctgggttgggaaaccacccagcgcgggccatgctgcattcgcagagcaaggctgccaccctgcggcctggccgggcctttggggaagcagagcggaaaggcggtgtttcgtggagcaacgctgccaccttgtggtcccgctggggatggccccggcaccatggatgctgcccagatccccggccccggacacgctcatagagtggtgggagcactgcctgggccagcctggcaggcgggaagggagggcaacggcaagccttacatctggctcatgcaggactcgtgaatgttcttggtgacggcctcgtagacggtcgggggcaaggccaggtagaagaggcggttggcctgtgaccccaggtggagggcattcatgtggctgttgaggcgctggtaggaggctgcatcatcgtactggccagccacataggagttgcgggcaaagaagtcctccagcttgagcttctcctctggggtggcctgggagacacggacagacagacac

SEQ ID NO: 71263 - DNA, 3395 bp, Homo sapiens
tgcagtgagccaagattgcgccactgtactccagcctggtgaaagagcaagactccatctcaaaaaaaagaaaaaacaaaaattagctggatgtggtggcaggcacctggaatcccagctactcaggaggctaaggcaggagaatcacttgaatccaggagacggaggttgcagtgagccaagattgcgccaccaaactccagcctgggtgacagcaagactccatgtcacgaaaaaaaaaaaaaaaaaaacacatgctcttcgaagcaatcaggcactgcaaccatggatgggtccatttctacaaaccattacagaatgggggccatgccaccaggtcaaacgccctcacccagagccaggcagttaggaagccaccacagggcttccaggagggcaactgctatggtgtgggtgccttgtgtgcttgcgctcttcaggggccctgctccacttctgatgctcctcaggtgagctcggtgccaggactacagcgacacggacctctcactgctgcacccttcaaagtccagcagacaacccctcgccctggggtaggagctcctctactcagctcctcacagcacctgccatcagtggggctggggaggggaacgttgcccatgtcacatcaactcacggctggccccacacagaaagggtcagcttactgggaactaactggaccctgaaataaacggaaagaaccacagcctgcaaatacctctaagcctcactcaaagcaggtcatgtttgctcatgaccaaattccggaagactgggaggcatcgggacagactccagaaaggtactggtggcaggggactggtctgctgagtcacagcaaccccacgctccaggccgtttgttcctgctgctccctttgggattaactagagattgaaccggctcaccttgtttcagctcaggccctgcaaccgaccgaccgtctgctgggctccaagtcacctgagaggcgaggtgaggtaagacggacagtaggggtggggtaaggcaggccgctctctcccatggtgacagggagctaagctgagctgagccggactgagctgctctcctcaggactcaggggtagccctgccctcccagctggctgcgatgctctagtgggactttctggaggaacaaacatgggaagacatcgggaaacctgacagcttggtcaagagtctactcgtgccatgtgggtgggggcaattcaaggggtccttagtgaaaagcagttgggagcttctcatcttccccacgccctcctctttcctgaggaccacagcaggggagggatctgcccaaggacacaaggtgacttagtagaagcagggcatgatgaagatctctagccaccaacatctggctaggccagggcaaagggacctgggccatgacctgtctgttttataaaccgaaatcgctgcagcccttgtcttggcatgagggtttcatggtagagcacgatgcctgctggagggccagcgggggtgggccatcccatccccaagggtcactggggttaaggacctgcccagactccctgggtggagccctgggccttggcaggggcccagctggttcctggccactggggccagagaacctgggggctgctgagttagttcagctgaaaaaccaacaaaagggcctccctgctatacccgggggctcatgagtcaccggggctttgggggagtgccaacatcatcatgacacagcaagaatcttatcagaccaatggggaagtcagcccagaaatgttctgaggaaaggggaggcgggggccgctgggtcatccctcccacaggcccatcattgggatgcgtcctgaacgcccatcaagcccatggcccttgtgatccaggtggggaaactaaggcccagagaagtgaggaccccgcagactatcaatcccagtctcttcccctcactccctgtgaagctctccagcatcatcgaggtcccatcaggtggggaaagatgctgttccaggcgcacactagtctacaaggccagagctttctggaagggggcagtaagtacctcggctccctttctggtaggggtgggagtcctgagaaggcaggaagtggcccacttggtaactctgaggtgccatcagggcccccaggaaggaagctgggtgtgtgggcaagtgtgaggtaagctggccagggaggaggaagggacagaggaaggccacgtgggtccagcctgccccagggtgtcctgcttgcccaggctgtgggtctgccagccacttgcctgctttcagtttctaggtcatgctgagcttgttcccaactcggggctccgggcatttgctcttccttctgtgtttgtgctctcccggccctctttgtgggatctatgcgctttgggggactggggacacagggcccatgtgtatcttctgaaacacacgtcagcctgaactcttgctggtctgcttacttgccgtggttccctggccgcaatagcacataggtcccatgaggagggcagggactggctgctgtggcccagaagtacccaatcgctgtctgctcaatgaacggagaatgggctgctttcctggaacagcagattctaggatcacgtgccctcaagtgccaccctgcctacctcccgcaccgagtgaggcatcaggcgtggaagaagcccgggagccggagctgttccaggtgctgcctgagcacgccacctcccatctcccccccagcaggaagaggaaaaaacaaaccacgaggctcttcagagagaggaccccttgtcccctacccacagtgctggagctggcacttcctatttctgctttgaaagcctcaggttgtcactctcagaacagaggagagcaaaggggaaccctactgatttcaacaaaacaaagttgcccaacccgaagctggccacaggcggaggcagtgaaatgacaaaatcagcttggaaaagcctaaggaccctgggccctcgtttcaaaagctgtcatttgctacacgaaatgctgaggttcaggaaaaggaagacacttgctccaactcacacagcaagcttggatgctctcaatgaggtgtctaataagagctgaaggccaggagtcataagctatcattgtggcctgggttgctctgttgcagtgccttgtgacagcatggggtggggatggagaaagcaacctcagttaccttctcctccagtctgcttcttggactaagggtttaacggtcagagtcctggctgttaaggtttgtggctgatgcaggtatggctctttttatttttatttttttgagatggagtctcactcactccgtcacccaggatggagtgcaatggtgccatctcagctcactgcaacctccacctcctgggttcaagcgatt

SEQ ID NO: 71264 - DNA, 1683 bp, Homo sapiens
cccggtcggcaagtccccttcgctctcggggtctcaggggctcaagagaggaggtgcggggtataaagggattggttaagaccctctcgattctgctcggttctcaagcacaacaaacagcgtgtattttaccgccgcgcggcgcagcgcgggacagtacgctcctccgcctgcgcggcgcccgcccggccggttacctgcgcttcgtcgtcgtcgccctccgcgctcgcagccccgaagtgtacgaccgtttccgggggctgagccccgccggcccatttaatcggcgggggcgggggcgggcgcctgggctgagcggacccgcctcaggcgaggcgtgcggggcggggcctcggccaccacccctcgtgcgggcggggcggggcgagggcaggtgcgcgcgcatcccaggccagcccctgcctctcgggcacctgcgctggaggccggcccgccggctgcctgccatacccgctgccgctgctctgcatccccaattccggcgggcacgggtgcagctccgcgtagtgctcccgaatccccatcgccggccaggccccgcccctactgtccggtttccccgcctgccccggcggcctcgcgcgctcgcggagggctccacttccgccggcagcgtggccacgcctcctctgggctgtccctcggctcctgggcggggccttctgccgcgccactcccccgggaaccctcgcctgttcgcgggtcaagccggccctattgggcagtctcttcttgattcctcccccggagagggcggggcggccgagcgccccgaggctagacgccgccgtccgagagacgagggggcgtgtaggcggtgacgccctgcaaagtggccggcgtgcttatcattaccgagcttccgcgggcctgcagagcctggcggactcagacttctctccggagcgggatgcggccctaccgcggcctcacacttctcgccggcttcccgagttctcgggggcggggcttgtgtttttacttccggatcccacagctatgacaccggaagccggaagcgtggtagggaagggcgaccgcgaaactgggactttctcggagcgccggggccctaccagcgttcacagtccgccgctcccacccttctcacgtctgacggactctgctgacaggtgtggtccttttccccaaagacagggttccatccgtgggcgttccgccgcctccgaaacttcccccggacgttcaggctcccccctcttttttgggccccagcccgttcctgctccgcgcttctggagcactggccaaggcgggccgattcaggacccaggttacttgggcggcgagctggactgtttctactcctccctcctcctccactgcggggtctgaccctactccttgtgtgaggactcctctagttcagagacatattctgttcaccaaacttgactgcgctctatcgaggtcgttaaattcttcggaaatgcctcacatatagtttggcagctaggtatctgatttcatatgcctgtttgctcgttttgcaagacaacatctgcctatcgtcatactgtttctgtgatctgagaatgaatgggctctcctggcacattagaggaatagcacggaggtcactatagctggagcagagtgagggaggggagcacagttggagaggaagggatggggaacccg

SEQ ID NO: 71265 - DNA, 834 bp, Homo sapiens
tttgacacccttcctcacccctgttcctctgactatggacaactttcccctaccgtgtttttcttgttcttgtgttgctattgacatatacttagtagattctagttactgtttagaaaacctaacaactcaattactgactgccacttgcaaggcccctaggaattttggatgtggtcccagaacatgaaatgaaataaagcatttggtaacaacttagagatttttggtaacctcccaagacctgctcctctaagctgatctcccgttctctgcccagtagctacaccttgaacgcactcacgaggctgggggttgtttatgtgttgcaaaaggtaagcatcattaaagaaacagaaatctggttaattttctattttctgctgagctttactcaagagggccctttccctccaccttctacttccttgccaaggggggccacaaaggttgggagtttccaggagcaggttacacacttctcctctctatcctggctcaatgccactagccctgggattgccggtgacctttcagcctgatggcctgtaaccttctgctccctgccagatagagttgggacttgtccaaggcgtggaataacttcctgtgattgtcctgaagatggcctggcccacaggatctgcttctatagcttgtcaacagaagcagaaaagtcctgtatctctacagtatggtgggccttggaagggagaatcctgaggagaaatgttcagcaaagataagtacaccaagaggtctgtgttcaagtacatacatgacatggacttgaccttcctcatgtattgtcaaccaaagtgccactgaatatcc

SEQ ID NO: 71266 - DNA, 1878 bp, Homo sapiens
ccaatgtaaaataccccattcatactgttgtgttttgcctatatgtggaaatgataatatttcggatacgctgggttaaaaaaattcattataaatcattttcacctttttctttttactcttctttcatgttgctgctggaaaatttaaaagtcaacatgtggcacgcacactactcctattggccatctgctctagctggatgggaactgcaagcagcaaaggcctttcaacctctccgagcttcaacatgttcacttatgcatcaggactgatccaacagcaacctgaaagggtcggtgtgagaaagcaaagaaagaggtactgtttacggagcgttcagccgtgagcccaggcgcaggcgcggagctaaacccggaggtgaagcaactacagctggggccacgcccacagactccgggctgtcggggcgggcggcactcgcgcttccagcctgggccaaccaggctgcttgaggctcgaagcgcatgcgcggtctcgccctccgtactggccgagccagcaaatcgcattgcgcagacgaccagcgggcgcctcggattccgcccccgggatggccccgcctcctcccgccccgcggcaaggcacgcacagggcagtgcgcgggtgggtgggtcctagcagcgcggcctgacgggaccaaggcggcgggagtctgcggtcgttccctcggctgtggaccgggcggcacgcacgcggtgcagggtaacatggcggatgcggaaggtaagggctgcaggcttccgggccgtgctaactccgggcgactcggggaacgggggtggggggatggtatcggggcccgcgcacgcctccctctggttcccgccggcgtgtcggcctcttcaccgcccggccttaagccggccttgtctctcggccctggctccgtggcaagggcgcgagagtgggagcccctcgcggtgacttggcatgatggggctcggccctctcacctccctggggtccgggtcgccgtcgaaagacatctgccgtgctgcccaccccgcggtggcgtgggacgtggcagtgtctgtgctgctgccagcccggacgccgccgttacagctccatgcgactaggggagcaagggtagtggaaacgggccgagaagaaaaggagcggagggaccccggagcagggatagagctccgagttgcaagaaagttctagaggccacaagcccgcggggacagtcgagtggtcgcttatggaactttccggccccctgcgtgagcgcttctgtgggatgtttaagctctgccatagccacgtggtgaaccggaagggaagccgacacgtgcagtagcctacagtcagttacccagccatgggacccatacatttggccttacacaccttgttttctcgcttacctacggatatacgttctaagaaatgggtcgttaggcgatttcatcattgtgtgaacatcagagggctcttacacaaacctaggtggcataggctactacacacctaggctgtatatggtgtagcgtatggctcctaggcttcaaacctggacagcatggtattgtgcggaatgctgtaggcagttgggacacagcgtcgagagtttgtgtacttaaacatgtctaagcagaaaaaggacagtaaaaatatagcacagggccgggcgcggtggctcaggcctgtgatcccagcccaggctggcggatcacctgcggtcaggagttcaagaccagcctggccaacatggtgaaaccccgtctctactaaaaatacaaaaaatttaggtgggcgtggtggtatacgcctgtaatcccagctactcgggaggctgaggcaggagaattgcttgaacctggagaaggaggttgcagtgagccgagt

SEQ ID NO: 71267 - DNA, 644 bp, Homo sapiens
aggcactgtggtaagaagaaagacaaacgacccatgtaatggaacagagagtgcaaaaacagagccacacatttatagtcaggtgacactgcagtgcagcggggaaaaatggtctgcacgataaatgtcataaaaggtcccgagtataaaatgaaaactaaaaagacaaacactttaaaagtaagaagtctattcatcaaaaaactccactgagataagcatagatttagtagacgagacacggagcaatcatcatacaagcaaacaactgacttcatcaaattcaaacatcttacataagaaactagacaggtatgacacagcctgagaataaacatttgcaatatttacatctgacaaaggatttgtatccagaacatataaagaactcttacaatttaataacaggatgaaaagaaccataaacaaatcctgaacttgagccaatgatatgcatgctgaagctttcaggggtaaagtgctctgatatctgaaacttattttgaaataccaggaaaaagaaggtggatagatgggcagtttttggatagaaatgtgataaagcaaacacagcaacatgttaactgtagaatctaggaggtgtggctatatgggtgtcactataaaattctttcatctttttg

SEQ ID NO: 71268 - DNA, 2991 bp, Homo sapiens
ctatcagaatagctgaaataaaaaaatagtgacaatactcataactggtgaagctgagggaaaattgggcatctcatacattgctggtgggaatgtaagtgatatggcttccatagaaaatagttgaacactttattaaaaaaccaaacacacaactaccataaaacccagggatgacactcctggatattcacctagagaaatggaaatttatgttcactcaaaagcctgtacatgaatgctcataacagctttatttataacagccaaaatctataaagaaccaaaatacaggtgaacagttaaagcgtggtacatccataccatggaacacttctcagcaattaaaacaaaaaacactattgatactaaaacaacttgggatccagctcaaaggcattatcctgactgaaagaaagctaatctatttcaaaacatcacatactatatgattccacttatataacattcctaaaatgacaaaatcatagagacattgaacagagtagtgactgcaaggagttgcggggatggggtagggaggaagacaagtgtgactataaagcgacagcaggagagaggcctttgtggggatggaacagttctctatcttcattgtggtggtggctagaggaattttattttattttatttattttatttttttgagacagactttcactcttattgcccaggctggagtgcaatggcacgatctcggctcaccacaacttccgcctcctggattcaagcgattctcctgcctcagcctcccgagtagctgagattacaggcatgcaccaccacgcccggctaattttgtattttttgtagagatggggtttctccgcattggccaggctggtcttgaactcccaacctcaggtgatccgcccgcctcggcctcccaaagtgctgggattacaggtgtgagccaccatgcctagctatgtcatattcttcttatccagctttattacagtgattgctttttacatgtcagcctttaaattaaagactcagcaaagcttactagaggcagaaccattccagctggaaaagttcaagagttgccatcccaaaggttggtctttcagatgtgcttatccaacaagacgttcctctttacgatgactaagagtcactatcacgcttacccagaagttgcaaatgatgactaagaaaaacggaaacttccaacgtggtaactaaagtacacacttgcaacagtaagttttccaaaagcaaagcacaattttctccaccgtgaacttgtccctgagccaccctgtcttcatgagactctcagaaagggagggtcagctctctgtgacctcatcttacagaactccttcaactagtccccatgtctcctcattactgacacatcataggagaaaagatatgcagacatatactgtcagtgacatgagtaatgctgaacaaataataaaggtcaaaggtactagattctatttctcagagttcagttcacaacctccacatcatcctctcaaagcagccaccatcatctgtagtggatataggaggccacagagctatggcaggcctgcccctgaccagtgacaaggcagggcggaagtggctctgttaaggatgactgctgggattcaggaggagccagggaataaacactcacccaggactccatgtctggcctttgttctgcagcctctggcctttaatcagacaaagtgctggagtggcaatgcctgccgctctgaaagccccttcagaggaaacatctgcagcagggttcaaagggcagaggcagttgctcaaaggaagctggaatttaaaaagagatgaaaaacaaacttggcggggggcgggcggtggcgggggtgaatagagcaggggcaactgaagttggctttctaatccaaacaattagattaagtgacagtgaacataggaaagaacaaatatttgctcagcctactgttaggctctttgccaactgctcccacgtggagacttagaaagccaagtccaagaaggcgagatgatgccagacagctgcccagcaagccctggccccaggtgctcgcaaattccctctctttgcatgggcagtatcctattccactttgggaaaaaacaagagaaactgagaaagccaagggtattctgaagtattagaaagagattagcactgtttaaccacaaatgacaggaactagggagagaggaaggcctaagagccaggatattctggcaggtactgtcttaaaatcatacattaaccaggtgctttgcttctcaggtactaaatccatctgggaacacatacatcaacctaaaggccaagtctctagagatcccttcccaacgagctttttctaccccatgctctcagtacacatgcaaaggcttttgcttccactggggaaaaaaaacaacaggaaactcaagtagcaccgttccacacagcagaaacacagggctgcagatacctggcactgagtccccacactgccattaaaccagtgccggagctgtgtgcaaataacaacactcgttaaatcaaatgctcatccccattctgtggtcaatatttgaagacatgaaatggttcagaaacctgtctgagcttaaaggatgagtaagcctcagactccagaagttaaactataagcatggactttggagtttgtgcaggtacatggagagaatgcaggtgctgtgtccctcacataaaggctgcctctgcactgtgcagaatattcagagatgatggcaggtgctaaggaggaaaataaagcagaaaaggcctcgcaaggaagataacttttgagggaaaacctattatgtgttttgttcatgtatatttcttcatatgaaagaaaaaaagaaaagcaagactatgttacgaaagttcctcttcccctcctctggcgtcacttcccctaccccagccaattttggaaatatggctatttagtcttgcctttctacactccacaccca

SEQ ID NO: 71269 - DNA, 1484 bp, Homo sapiens
agtgagccgtgtccccacctgacagaccctgagtgacgaccaccttgctgggcccaatcaaaacgaaatatgagagacaagaaaatgctcagtgttgtaaaccagcgagtttgggagagatttgccagtaacagataagcacaacctacccttagggcatctttgaggacggaggttaatagctatttaccagccatccatccctggaatctggattccttgttccacccgcaaatatacactggccaccctctttgcaccatagcacaaggggacctgcctaaatgaagaggaacagtgagtgagctctttagaaccagaagctggcttttacaatcatttctgctgacccaaacacaagcacttcaacaacaaccaggcagacctactccttgatgtgttccttaaagactttctgttactctgacttccgtccacgaggaagttttccttgcccttaataagcgcactgtccaggccgctgcctctcctgatttccaactggaaggactgctgggggcaaggatccactgcaccagcagcccggtacgaacccggccgcgcgctggccttgtcctcaccccgccggctatcgcggtctccgacctatggccaggacccgcaaggacaggccccccggggacagggaccgggacagggaaagtcccgagatgaatggccgagccccggcccagcgcccttgggactagcggggcccgctcacctctggccgactacgcttctgcagcaaatgctccaggtagaggtcggagagcgccgtgtgcatgctgcccccactctcgccctcgctcgccttgagggtcatctcgcagaagctggaacactggaacgcaagacagggcagcgctgggaatgacagggcccggggcctgcggggctgcggagaaggcgggagacgcggtgcggctgggccagtcaccgccccgcaggcggtgcgccgggagggcgcggacggagctccgcctacggcccgcccactcctgccctcgctccgcccatggaagtctcccacgccccggactccgcggctccctgcgctccgagaagcggcccttaaagggcctgaggaagtcgtagctgtaggtggccgcgtgagatgaatgccagaaagataagaaaggggagggggcccccagcttctgggtggttgagcacacggcccacgccccgttgggcctgagccgcccgggtgccctggccaaattcgtggggattgcagggaggcaacaagggaaatcagaatcggccggcttagtggagttcaaaagatgtaggtgaactctagactcttcccataaattgatgcgggcgcagcattaccctttgagatctggacattgcgaaaatgcctttaaggctgctgtgctgctgcaccctgtcatttaattgttgtgtgctgtttgatgatgaaacatcttattgccttcaaaaccaaactgtttttacttagggcagatctcctg

SEQ ID NO: 71270 - DNA, 579 bp, Homo sapiens
ggaaacttttgtttacaggcttattttgagtagaaagatttttgtttatgacattttgccgttctttctctctctcgcacccttaatgcttagaaataaaaattagcttggactaagaaagcaacagtacgtgtgctgctactcatcaggctgggataagagacatagataaagctaactgcagagttaacaacaccatttctcccaaggacacattgccactgtataaactcactgaatgccaactatttgctttgattatctcttgctttcttactcaattgagttgtttgttctctgaattcacagcctgccagaaatgtttgaactaatagcaacaagaatgaaacatctcattctttcctaggtcatctaaattactttgacacaaagaagcagctcaatttaaagctcaagcttcaggtaaggggtgccttgacttaacctttcatgtctatgttaactttttagaacacttcacagtctagacctcatggttatttctttacacacaactctactttgcttcatttaaatatcacctaacctccacccttccccaaaattctttactaactc

SEQ ID NO: 71271 - DNA, 2099 bp, Homo sapiens
cccgagtagctgggactacaggcggccgccaccatgcccggctaattttttgtatttttagtagagacggggtttcaccatgttagccaggatggcctcgatctcctgaccgcgtgatccgcccgcctcggcctccgaaactgctgaaattacaggcgtgagccaccgcgcccggccagataaggtatatttttattccttttatttttactcaactcctatggtgccacaaaatcctatattaagcagtataattgaaaagaaaaagaaaacaatagcacaatgattataaagaaaatagcctgagttaacttcatttgtgtcactcctaaagcagtggatcagatgtcaatgtttattatcattcactaattacatttatgaataatttttaaaagtaaaggaaaagactggctgttttaactaacataatagaaactgttgctggattttctgttgaaggtatattttgaagtgagttttattaagtataactcgcatgtaaaattcaaaagaaaaattaaatacataaataaaatgtgtcttcctccactaaaagagtaggacacatcgcagaagccgataaatatttgttcaatgtttacatgaacaaacacggtcactcagccgtctttattttcagtgagtcataggtaaaatattcttcaccaggcgaggattgagtcgcagtcgcgtcaggaactcgcctccaggtactgagcgagcgagccccgacggccgcggtgggtggaggggggaaagtgggggagagtggggcgggagtagagggagagcgagggagggagcctcacccccgggacgctttctgcgcacgcgcatctcggtgcatctgttgggcgggaccgcggggcctgtgacaccgcacgctgagctctgtgatgtagccgcttgcggagactgcaagcagccgcggcgcgcccggccctccctcttccgctgccgccgtgggaatggaaacatctgccccacgtgccggaagccaagtggtggcgacaactgcgcgccactccgcggcctaccgcgcagatcctctacgtgtgtcctcgcgagacaagctcaccgaaatggccgcgtccagtcaaggtaagggcgggcgcgcgcgcggccggcgccgcggggagccgccttcctgggctccggaaggggaagggctccgcgcccgccagtcgcgaccgagctccccggggagtccaagcggcgcggggacggggagggcgctcggggatcgcccctggctcagccgctcccagggtccggccaaggtcacgcgcgtgtctggggcctaaccaccctggggtgtcgtctccagtggagctcacccagccttccggcgccgcccccggcgcagaagcccgaagacattctgtccccgttctcggaagcggtctggcttctttgtccctttggacgttcatctcaaatgcctcgtggcgtcattctgtgtacaaggcacctccccaactgctttattgttggttttgaaaaactagcacatatgggatggtacttaggaatagccttctgtttagtcggcatagtcaaagattccgtgtaattcgcagtggagcacgtctttaagttatgcgtcttaccctattttgaatgtttaggttgtatttaatttagtactgactcacgggatcccattgctaaacagagccatcattgaaaactcaatcatataaacgtaaaattacgtaaattatgttaaaaacaaaggcagtgaaaatactaaaaactcatcacttttattatttaccatgttttattgttactttacttttgaggttatttatacatctattgtatctttgtggaggagatactatactatggtgctctactgtgcgtctcttcccatctctgggttcagtagtttcacaattcagtaatgtcatgctcacgatgaatgaatacgcaatggaaattggctacactacaaatcagcccttgcctaaagccgactgttaagcatttcaccagcacgccgctaaattttagatgactctgggaaggtggaatgtgcaatgtgataattatgtattttcctgcagagcagactgctcttatagactttt

SEQ ID NO: 71272 - DNA, 441 bp, Homo sapiens
agtgcagctttactctttcgccataactgtccccatgaactctccttctttgtccttgattcaaagagccattgtctctacctcctgatgtgcatcctccttcccatcaggctccctctagtcttattctccccacaccagccagtagtcattttcatatgtaagtctatttaattattattaaatagactattagtgtaagtccattgccctttgggtaaagtgcaaattacgtaaccgatgaggggattgacattgttaagactggcataggtataatagagatgattcttaatattattaacatccttagcaaaacaacccattgtactatcttctgttttcaggtggtgtcatttgtgaagaagaatgttctagtaactgggggatttttcggaggctttctgcttggcatggcatcctaaggaagatgacctcatg

SEQ ID NO: 71273 - DNA, 782 bp, Homo sapiens
ggagtcaatttcaagttacggatcctgactaagtgcttttgttgacttgctttctgcctacgtaacctctctctgcagtttcacttgcagtattcttcatgacccttgctaaacttctgtttcttgagcagtttttcaacccactccctccccccaggcccaagggtgggtgcactgcagtagtggatgaagtgattgccaaatactgaacagaacaaaggagcatatcttcgtagaatcccagcacctggaaaaaaaaatcattaaaatcaccacaactgaatagagccaaaacaaagagggggaggacagaggagaaatagaaatacataccaggttagtcatcaggcaaaagcttaagcaacagctcctgtactcccctgacctgtcagaaaaagaaaagtttatggagtactctgttacgagagtcccagtacaatggaaaataattaagcaacatgtgtaccattaaatgatgctgtatctgccacaagcgagagttgttatccatgtagcgctcctccgggtagagttgccacatgagaggtagctgggaggtaagaaggtgacttggcctagctgcgtcacctaagggaacctgaatttgctggactcgtgcccttaggaaactcgtctcctaatggaaaggaatgatcaaaaataaaaccaaagacttcagaatattgagactggaatagaaaccaagttacttgaaagcaaaatcaaagaaataagcaaaatgtaaacagttacctcttccacgacggccacccacgtgcgct

SEQ ID NO: 71274 - DNA, 631 bp, Homo sapiens
ttttaaaaaagtggaaaccatgtgttaagggtttcaggaccatctcaatttcatagataggtcctagcaacaaccaacatgttgacatttaaatttgttttgaatggaaaacaaaattgcattggttatattgacattaaaaggaaataatgccagtggaatagagggcaaagagtttggagatgatggtctgagttactgagtcactacaaagaggcctatgagtcactacaaaatattctcagaagaaaggcagtgtgatgtgctgctgtgacccaaaggtcaacatgctgggcatcagcgggatgagcttgggaaccacctctcagcacagtatcctggaattgtgtgtgctagcattcagagggcatgcaggcccagagaaagacaactgcagtgatcaagggacagagaagtcaccatatgagcatgaacaaagtcctcagcagagaaatgcaaaggctgagggagagggattcagatcaaagcctatacaatcacaggttttatgagtggaaaaatgtgattcttagaaaacttgctcccaacattttccttggtcaaataagtttgggaatcttggagagtcataaagcacattagtgtagtaactgttctggcaagttatgca

SEQ ID NO: 71275 - DNA, 2240 bp, Homo sapiens
ccttacagatcgttaggtaaaaacggaggctgctggcgtgcacattacagatcgttgcactggatggggaccctatgtgtggggagacttgggttggaactgacttgggagaaaagagcaaagcatcaacacttcaagtagcaccttgggaatgttccctttccagtactgccatacctgcctggcttcaaaactacacaaagtagaaaaccaaatcaaagacacgaacacggacgggctgtggaggcggcacggcatatattgtgctttgatttagaatcgctttcaaaatccacgtgtgattcctagacttgtgagttggaagatctgtacttttatccttggcacgtttgacatacctcgaaataaaaattacttttacatatatttttactgtctgatatcatcgagacaaggagacccgaggaaacttgcattctggatacctaatgtgatacatccgaacttgaataaaaactgaagttctccatttccccttccctgtatccaacaaatagctacctaaaagcctttgtagaaagtagcagcagccaagcttaagagtgatactttttcagatacagtataacactgtttctgcaaaaggttactcacatgaatataatgtttcttgggctaattaatccgccttgagaacagctaggctaaaacttccaggtctcccaccctgggccactcaagccaggatcgcgacgtgagcccggggtgagccgaggggcatcccgggccgaggtcactcgaaccgaagttatgaggcgcgggccggcaaccggaagtggtccagggagagttgtacgagattcgggggctgtgacttggaaataaaacaaaataaaataaaaccttaactgttttgggactgactttcaaaagagcgtccccctggctcaagaggccggcgttcgcggagatgtcgtcttaaagggctgtcccccaagcgtgtaggccgcgcacgggtctccttagcgggcgggcaaaatgggcgccggtactcgggaggcgcctgcccaggcgcccgggcgccgctcacagagtacgtccgcctgcggccccagagcgccgcctccctgccgcccccgccgcccggcctgacgcccggaccgcggccggccaccgccctccgccccgacggccacgcctgccccaaaccgcgcgggcgtttcccaggtgctgctgggcgggccccgcccccgtgccccaaggcccgcccccgcgcgccagccgcgcgcccgctgccccctcctcgcccccacagccccgcccccacagccccgcccgctccctaagccccgccccctaggaacccgcgcgccgaaggccaggcctgggcggagcgcacagcgctgggcgctggggaggctgcgccgcagcacccggttggtcaggaccaagtgggcccgaggcggacgtgagaagggtcgggccaagatggcggtgcaggtggtgcaggcggtgcaggcggttcatctcgagtctgacgctttcctcgtttgtctcaaccacgctctgagcacagagaaggaggaagtaatggggctgtgcataggggaggtgagtaggtctgttagcctggatggaaccctgctgagcagtcccagtgtgtccccggggtgggtgccggcagctcccagggctgcggaggccacaggcatcctcgatttaggtccttggacaccctttacatagctctgtcgcggggagccccgtttcttctggccgcctgacacttgtttagtctcctgcgagcccccggcggtctgtacaggccccgggagccttgccctttctcctgtagcctggggcttctctttagatctgcgcttttcgcccggttgaccaaaactgcaaggcaggtcagaaagacactggagtataatgaggatgtccgggtattacgacgcagcagctgaccacagttagagccccttgcctcgcctcgagtcttctgtctagggagcagagatatcaaccaaagcatttgaagggtatcgaagagcctaacagaaggtgcggggcttgaaggaagcaaaagtttccgctgcattgtgttgaggaggggccgaagaggatgaggaaatacagtttagctgtttacagtctaaagtaattctccagtctttcataccatgtgcgtgaacacatgacctaattgtcatataatctgcatccatatatgtcaaacaaacgtaatgtgatcaataatgttttttgctttttcc

SEQ ID NO: 71276 - DNA, 1616 bp, Homo sapiens
tccatgggcctagaagcctaggtggagttcttaggattttgtatgtagactatgaagttttggaaacgtttgagctggagagaagacattctgatcaaaggtggctttcaggaaaggctggtgcgacaggcagggtatttattagaatgaggccagtgaccactctgaaacagacacaaagtaagttcccttcaaggggcaggaagctccctgggatggtgagaccagaaaggcacagaggctgaaccctcgtgatggcgctaggtcccaggttcgctagcatccgagagaggggattgggtcgctccagaggccattgcgaaggctgctgccagttctagggtcggggtggggtcaggctaggtccctattcctagggctttagcaccgctcactcacaagaccccttttcccaggaggacgtatgggtttttcctgtcgctccagcttctctttcgcggcccttccacgcttgtcacttacctgagcgcagccaatcagcacctagaggttgggctactttcggccaaaggagaacggggacttgtgggggacgctccctgcgcaccaatgaatgtgcatggagatggagaggcgggcctgcaagtgcgaacaagccaatcacggaatcccggcggccggcggcccgggaggcagtcgcgcgctcgcatccccaagatggcggccgttaaggacagttgtggcaaaggagaaatggccacagggaatgggcggcggctccacctggggattcctgaggccgtgtttgtggtaagaggcacgctgttccctggcatcttggcttgaggccttggactgcccctttcttcccggctcccacccaggcctcgactgttggaaggagctgagccaagtgttcagggagggggcgctcggtctgctctcacccctcgcacctggacagattgagctctgctgggggcccgcccggaagaaacgtagctcgagaaggccgtagaagagaacggggtgcggggccgggacgaggggcgaggggcgaggggcggcgggtggcagggcagggcggcctgagggacctccgggctgccgccggttttcgtccccctgctggttggaaaaggggaggtggtgaggagctctcgactcagcatggatgctggagacacagtacaatgaataggcagaacagccagtgctaagatgtgaaaaccgggaatatcactttgtctgttgaaggaatgcagtggtctcgggaatgttgcctcgggaaatggaagaagagaccgatgggaaaataggatgataggttgggagtgtaaagtccttctgtgtcttgctaaggaattgaggttttccagtaggcaacgggctgtcatcagaaggcctttcgttttaactacatcattctaacaacttagtggagaatgaattgttgagagaggaggctgaaccctcctgatggcgctaggtcccaggttcgctagtgtcctagaggggatcgggttgctccacaggccgttctggagggcgctgcctgtgctgggtggctttttaaaaattttattttatttatttaatttagaaatagtagttgaaaactatttgactaatgagagaaaacatctgactggccc

SEQ ID NO: 71277 - DNA, 1534 bp, Homo sapiens
atgtaatttttactacagtgtgtcctgaaagggcaaaccaagctacaagcaactctaaaagactactactgtatgggagtggattatgaaagtgtttcttaaatatgagagctcaagtttttctttcagcgactgagttaaagcacgcaactcatttatcatgagacttttgctaggcagtgtactatgtccactcaacacacatcattttaggcaatcatctggttaaaacgtttaatagtatggcattcacaaacccattcttcagagttgacattcaattaatggtttgaatgtcgtttccagggcagtcaggagtatttaaaggcttttccattgttttcggaagagaaagaaaacttcctagcctaacttacttacccagagccttgctccagagggggcagacaaagggtaaaatctgggcagagaacattagtggatatgagaacgaaagaaagtgctgcaagatcttgcagacagctgagttccaccttccactctactgccgaacaaagtgaggcaggaagagggtagggactcgctgaaagctaaacaccaagtcagtgacagatccagggctgtaaagtccgaccgagattgaaacaatgtacactgggcgtcagtcccaacgcgagcttgctccagctcttccagctcttcctgagcgctaggcccatccggcctcacgctgatctccgggcagactctgtcgcgcaactggcacagatcgtgacgacaaccctgcggcaaggcaggagtggccttcctctccgccagggttaaggtgagtaccaccgcccttgggcccagcagcccgggtgagagcctccgccgcccactgcgacaggcctgaaagcgagcgcctgggtaaacccacccgtagcacccatggggacaccccttccctgacccacgggacggaacccacctgtgctggaggtcgtgactgctaactccgcagagtgggcagaattccaagcaaggagagtctcgggaggcagcctttcacccgccttttgccttttcacccccaaaactgtcggccccacgctcccctcccccagcccgctcgggcccagcggagagcctgtaggccccgccccactccttccggccgtgcagggtgggtgcctctggcgcccgggacttcgcccggtgctagggcgtcagtctcccattcggaaggactgggccggggcactctattcaatcgcctttagtgaacatacttgaagctataggtgcagggatgagaaaaaacaggcccataaagctataaaacctgggtcccctgcctgccatttcagtgctcctcccgagtcctcccactacgcttctatttatggtagtttatccaggtttactagaagtaaaattctactacctttccaccattttcttgagtttatggaagtcatataccgctcattactcccatcgattcagctgagcatcttgaacccagggtccagatacagtgctacatacagtgagcactagaagggaatacccattaggaatgaacacctta

SEQ ID NO: 71278 - DNA, 434 bp, Homo sapiens
tggggctgcacgcacgctacagtgactggctcagcgtgtgcctaccctacgtggcagacgcgggtaacctgttgaacaccattggtgatggtgatcggggattgcaattattccccatgaatgacgaattcccagtaagtgtgggtcataggcttgcgtgaagtccctaccctttgtacacactgccagtcgctactactgattggatggtttagtgaggcccttggatcggccccgccgggtcagcccactgccctggtggagcactgagaagacagtcgaacttgactatctagaggaagtaaaagtcataacaaaatttccatagttgaacctgtcgagggatcattaacggagaagagcaaagctgcagaggcgctactgcgtccttccttcttggccgactgtgttccccatgcggcacgtgtgctggc

SEQ ID NO: 71279 - DNA, 951 bp, Homo sapiens
ggtggtggcattagttggatttggggccaacccagtgttggaagtactctgggaggagttacttgaagttccagttgttgtttcactggaataaatctgcgtgggtaggagcagtgccagcagcagcagccccagcccaagcctggccaccattgctctgcccatgtcccctacgtcggtgcgcggcgcgtctagcaggatgctgggtgcttggagaaccgctggctccgggcgggcgcaggcaaggtggggagcgcggcgagccggcgagaccctggccgacgggacccgggcgccgcctagcgcgaacccttcccggctggtcggcgctcctcgcaggcggtgtcccggtccggagcgatctgcgcgctcggccccgcggccgcgccctccccgaagcccttgctttgttctgtgagcgcctcgtgtcagccaggcgcagtgagctcacgggggcgtcccgggtccgcatcctcccaggagctggggagccgctcgctgggcgcggacccgctgcctgacgctgcaaactacacggtttcggtcccccgcgctcctgcctgcggcgggcgaggaggagacggcccaccctaaggggaccccctccgcggccctgaagcccccacccgcaacacagaattctatgcagccataaaaaaaggatgagttcatgtcctttgcagggacatagacgacactggaaaccatcattctcagcaaactaaggcaagaacggaaaaccaaacacctcatgttctcactcataagtgggagttgaacaatgagaacacatagacacacggaggagaacatcacacaccaggcactgtttgggggtgcgggggtaggggagggatagcattaggaaaaatacctaatgtagatgacgggttgatgagtgcagcaaaccaccacggcacatgaatacctatgtaacaaacatgcacgttc

SEQ ID NO: 71280 - DNA, 4081 bp, Homo sapiens
gatcacaggtctatcaccctattaaccactcacgggagctctccatgcatttggtattttcgtctggggggtgtgcacgcgatagcattgcgagacgctggagccggagcaccctatgtcgcagtatctgtctttgattcctgcctcattctattatttatcgcacctacgttcaatattacaggcgaacatacctactaaagtgtgttaattaattaatgcttgtaggacataataataacaattgaatgtctgcacagccgctttccacacagacatcataacaaaaaatttccaccaaacccccccctccccccgcttctggccacagcacttaaacacatctctgccaaaccccaaaaacaaagaaccctaacaccagcctaaccagatttcaaattttatctttaggcggtatgcacttttaacagtcaccccccaactaacacattattttcccctcccactcccatactactaatctcatcaatacaacccccgcccatcctacccagcacacacacaccgctgctaaccccataccccgaaccaaccaaaccccaaagacaccccccacagtttatgtagcttacctcctcaaagcaatacactgaaaatgtttagacgggctcacatcaccccataaacaaataggtttggtcctagcctttctattagctcttagtaagattacacatgcaagcatccccgttccagtgagttcaccctctaaatcaccacgatcaaaagggacaagcatcaagcacgcagcaatgcagctcaaaacgcttagcctagccacacccccacgggaaacagcagtgattaacctttagcaataaacgaaagtttaactaagctatactaaccccagggttggtcaatttcgtgccagccaccgcggtcacacgattaacccaagtcaatagaagccggcgtaaagagtgttttagatcaccccctccccaataaagctaaaactcacctgagttgtaaaaaactccagttgacacaaaatagactacgaaagtggctttaacatatctgaacacacaatagctaagacccaaactgggattagataccccactatgcttagccctaaacctcaacagttaaatcaacaaaactgctcgccagaacactacgagccacagcttaaaactcaaaggacctggcggtgcttcatatccctctagaggagcctgttctgtaatcgataaaccccgatcaacctcaccacctcttgctcagcctatataccgccatcttcagcaaaccctgatgaaggctacaaagtaagcgcaagtacccacgtaaagacgttaggtcaaggtgtagcccatgaggtggcaagaaatgggctacattttctaccccagaaaactacgatagcccttatgaaacttaagggtcgaaggtggatttagcagtaaactgagagtagagtgcttagttgaacagggccctgaagcgcgtacacaccgcccgtcaccctcctcaagtatacttcaaaggacatttaactaaaacccctacgcatttatatagaggagacaagtcgtaacatggtaagtgtactggaaagtgcacttggacgaaccagagtgtagcttaacacaaagcacccaacttacacttaggagatttcaacttaacttgaccgctctgagctaaacctagccccaaacccactccaccttactaccagacaaccttagccaaaccatttacccaaataaagtataggcgatagaaattgaaacctggcgcaatagatatagtaccgcaagggaaagatgaaaaattataaccaagcataatatagcaaggactaacccctataccttctgcataatgaattaactagaaataactttgcaaggagagccaaagctaagacccccgaaaccagacgagctacctaagaacagctaaaagagcacacccgtctatgtagcaaaatagtgggaagatttataggtagaggcgacaaacctaccgagcctggtgatagctggttgtccaagatagaatcttagttcaactttaaatttgcccacagaaccctctaaatccccttgtaaatttaactgttagtccaaagaggaacagctctttggacactaggaaaaaaccttgtagagagagtaaaaaatttaacacccatagtaggcctaaaagcagccaccaattaagaaagcgttcaagctcaacacccactacctaaaaaatcccaaacatataactgaactcctcacacccaattggaccaatctatcaccctatagaagaactaatgttagtataagtaacatgaaaacattctcctccgcataagcctgcgtcagatcaaaacactgaactgacaattaacagcccaatatctacaatcaaccaacaagtcattattaccctcactgtcaacccaacacaggcatgctcataaggaaaggttaaaaaaagtaaaaggaactcggcaaaccttaccccgcctgtttaccaaaaacatcacctctagcatcaccagtattagaggcaccgcctgcccagtgacacatgtttaacggccgcggtaccctaaccgtgcaaaggtagcataatcacttgttccttaaatagggacctgtatgaatggctccacgagggttcagctgtctcttacttttaaccagtgaaattgacctgcccgtgaagaggcgggcatgacacagcaagacgagaagaccctatggagctttaatttattaatgcaaacagtacctaacaaacccacaggtcctaaactaccaaacctgcattaaaaatttcggttggggcgacctcggagcagaacccaacctccgagcagtacatgctaagacttcaccagtcaaagcgaactactatactcaattgatccaataacttgaccaacggaacaagttaccctagggataacagcgcaatcctattctagagtccatatcaacaatagggtttacgacctcgatgttggatcaggacatcccgatggtgcagccgctattaaaggttcgtttgttcaacgattaaagtcctacgtgatctgagttcagaccggagtaatccaggtcggtttctatctacttcaaattcctccctgtacgaaaggacaagagaaataaggcctacttcacaaagcgccttcccccgtaaatgatatcatctcaacttagtattatacccacacccacccaagaacagggtttgttaagatggcagagcccggtaatcgcataaaacttaaaactttacagtcagaggttcaattcctcttcttaacaacatacccatggccaacctcctactcctcattgtacccattctaatcgcaatggcattcctaatgcttaccgaacgaaaaattctaggctatatacaactacgcaaaggccccaacgttgtaggcccctacgggctactacaacccttcgctgacgccataaaactcttcaccaaagagcccctaaaacccgccacatctaccatcaccctctacatcaccgccccgaccttagctctcaccatcgctcttctactatgaacccccctccccatacccaaccccctggtcaacctcaacctaggcctcctatttattctagccacctctagcctagccgtttactcaatcctctgatcagggtgagcatcaaactcaaactacgccctgatcggcgcactgcgagcagtagcccaaacaatctcatatgaagtcaccctagccatcattctactatcaacattactaataagtggctcctttaacctctccacccttatcacaacacaagaacacctctgattactcctgccatcatgacccttggccataatatgatttatctccacactagcagagaccaaccgaacccccttcgaccttgccgaaggggagtccgaactagtctcaggcttcaacatcgaatacgccgcaggccccttcgccctattcttcatagccgaatacacaaacattattataataaacaccctcaccactacaatcttcctaggaacaacatatgacgcactctcccctgaactctacacaacatat

SEQ ID NO: 71281 - DNA, 7345 bp, Homo sapiens
cctatcatatagtaaaacccagcccatgacccctaacaggggccctctcagccctcctaatgacctccggcctagccatgtgatttcacttccactccataacgctcctcatactaggcctactaaccaacacactaaccatataccaatggtggcgcgatgtaacacgagaaagcacataccaaggccaccacacaccacctgtccaaaaaggccttcgatacgggataatcctatttattacctcagaagtttttttcttcgcaggatttttctgagccttttaccactccagcctagcccctaccccccaactaggagggcactggcccccaacaggcatcaccccgctaaatcccctagaagtcccactcctaaacacatccgtattactcgcatcaggagtatcaatcacctgagctcaccatagtctaatagaaaacaaccgaaaccaaataattcaagcactgcttattacaattttactgggtctctattttaccctcctacaagcctcagagtacttcgagtctcccttcaccatttccgacggcatctacggctcaacattttttgtagccacaggcttccacggacttcacgtcattattggctcaactttcctcactatctgcttcatccgccaactaatatttcactttacatccaaacatcactttggcttcgaagccgccgcctgatactggcattttgtagatgtggtttgactatttctgtatgtctccatctattgatgagggtcttactcttttagtataaatagtaccgttaacttccaattaactagttttgacaacattcaaaaaagagtaataaacttcgccttaattttaataatcaacaccctcctagccttactactaataattattacattttgactaccacaactcaacggctacatagaaaaatccaccccttacgagtgcggcttcgaccctatatcccccgcccgcgtccctttctccataaaattcttcttagtagctattaccttcttattatttgatctagaaattgccctccttttacccctaccatgagccctacaaacaactaacctgccactaatagttatgtcatccctcttattaatcatcatcctagccctaagtctggcctatgagtgactacaaaaaggattagactgagccgaattggtatatagtttaaacaaaacgaatgatttcgactcattaaattatgataatcatatttaccaaatgcccctcatttacataaatattatactagcatttaccatctcacttctaggaatactagtatatcgctcacacctcatatcctccctactatgcctagaaggaataatactatcgctgttcattatagctactctcataaccctcaacacccactccctcttagccaatattgtgcctattgccatactagtctttgccgcctgcgaagcagcggtgggcctagccctactagtctcaatctccaacacatatggcctagactacgtacataacctaaacctactccaatgctaaaactaatcgtcccaacaattatattactaccactgacatgactttccaaaaagcacataatttgaatcaacacaaccacccacagcctaattattagcatcatccccctactattttttaaccaaatcaacaacaacctatttagctgttccccaaccttttcctccgaccccctaacaacccccctcctaatactaactacctgactcctacccctcacaatcatggcaagccaacgccacttatccagcgaaccactatcacgaaaaaaactctacctctctatactaatctccctacaaatctccttaattataacattcacagccacagaactaatcatattttatatcttcttcgaaaccacacttatccccaccttggctatcatcacccgatgaggcaaccagccagaacgcctgaacgcaggcacatacttcctattctacaccctagtaggctcccttcccctactcatcgcactaatttacactcacaacaccctaggctcactaaacattctactactcactctcactgcccaagaactatcaaactcctgagccaacaacttaatatgactagcttacacaatagcttttatagtaaagatacctctttacggactccacttatgactccctaaagcccatgtcgaagcccccatcgctgggtcaatagtacttgccgcagtactcttaaaactaggcggctatggtataatacgcctcacactcattctcaaccccctgacaaaacacatagcctaccccttccttgtactatccctatgaggcataattataacaagctccatctgcctacgacaaacagacctaaaatcgctcattgcatactcttcaatcagccacatagccctcgtagtaacagccattctcatccaaaccccctgaagcttcaccggcgcagtcattctcataatcgcccacggactcacatcctcattactattctgcctagcaaactcaaactacgaacgcactcacagtcgcatcataatcctctctcaaggacttcaaactctactcccactaatagctttttgatgacttctagcaagcctcgctaacctcgccttaccccccactattaacctactgggagaactctctgtgctagtaaccacgttctcctgatcaaatatcactctcctacttacaggactcaacatactagtcacagccctatactccctctacatatttaccacaacacaatggggctcactcacccaccacattaacaacataaaaccctcattcacacgagaaaacaccctcatgttcatacacctatcccccattctcctcctatccctcaaccccgacatcattaccgggttttcctcttgtaaatatagtttaaccaaaacatcagattgtgaatctgacaacagaggcttacgaccccttatttaccgagaaagctcacaagaactgctaactcatgcccccatgtctaacaacatggctttctcaacttttaaaggataacagctatccattggtcttaggccccaaaaattttggtgcaactccaaataaaagtaataaccatgcacactactataaccaccctaaccctgacttccctaattccccccatccttaccaccctcgttaaccctaacaaaaaaaactcatacccccattatgtaaaatccattgtcgcatccacctttattatcagtctcttccccacaacaatattcatgtgcctagaccaagaagttattatctcgaactgacactgagccacaacccaaacaacccagctctccctaagcttcaaactagactacttctccataatattcatccctgtagcattgttcgttacatggtccatcatagaattctcactgtgatatataaactcagacccaaacattaatcagttcttcaaatatctactcattttcctaattaccatactaatcttagttaccgctaacaacctattccaactgttcatcggctgagagggcgtaggaattatatccttcttgctcatcagttgatgatacgcccgagcagatgccaacacagcagccattcaagcagtcctatacaaccgtatcggcgatatcggtttcatcctcgccttagcatgatttatcctacactccaactcatgagacccacaacaaatagcccttctaaacgctaatccaagcctcaccccactactaggcctcctcctagcagcagcaggcaaatcagcccaattaggtctccacccctgactcccctcagccatagaaggccccaccccagtctcagccctactccactcaagcactatagttgtagcaggaatcttcttactcatccgcttccaccccctagcagaaaatagcccactaatccaaactctaacactatgcttaggcgctatcaccactctgttcgcagcagtctgcgcccttacacaaaatgacatcaaaaaaatcgtagccttctccacttcaagtcaactaggactcataatagttacaatcggcatcaaccaaccacacctagcattcctgcacatctgtacccacgccttcttcaaagccatactatttatgtgctccgggtccatcatccacaaccttaacaatgaacaagatattcgaaaaataggaggactactcaaaaccatacctctcacttcaacctccctcaccattggcagcctagcattagcaggaatacctttcctcacaggtttctactccaaagaccacatcatcgaaaccgcaaacatatcatacacaaacgcctgagccctatctattactctcatcgctacctccctgacaagcgcctatagcactcgaataattcttctcaccctaacaggtcaacctcgcttccccacccttactaacattaacgaaaataaccccaccctactaaaccccattaaacgcctggcagccggaagcctattcgcaggatttctcattactaacaacatttcccccgcatcccccttccaaacaacaatccccctctacctaaaactcacagccctcgctgtcactttcctaggacttctaacagccctagacctcaactacctaaccaacaaacttaaaataaaatccccactatgcacattttatttctccaacatactcggattctaccctagcatcacacaccgcacaatcccctatctaggccttcttacgagccaaaacctgcccctactcctcctagacctaacctgactagaaaagctattacctaaaacaatttcacagcaccaaatctccacctccatcatcacctcaacccaaaaaggcataattaaactttacttcctctctttcttcttcccactcatcctaaccctactcctaatcacataacctattcccccgagcaatctcaattacaatatatacaccaacaaacaatgttcaaccagtaaccactactaatcaacgcccataatcatacaaagcccccgcaccaataggatcctcccgaatcaaccctgacccctctccttcataaattattcagcttcctacactattaaagtttaccacaaccaccaccccatcatactctttcacccacagcaccaatcctacctccatcgctaaccccactaaaacactcaccaagacctcaacccctgacccccatgcctcaggatactcctcaatagccatcgctgtagtatatccaaagacaaccatcattccccctaaataaattaaaaaaactattaaacccatataacctcccccaaaattcagaataataacacacccgaccacaccgctaacaatcagtactaaacccccataaataggagaaggcttagaagaaaaccccacaaaccccattactaaacccacactcaacagaaacaaagcatacatcattattctcgcacggactacaaccacgaccaatgatatgaaaaaccatcgttgtatttcaactacaagaacaccaatgaccccaatacgcaaaattaaccccctaataaaattaattaaccactcattcatcgacctccccaccccatccaacatctccgcatgatgaaacttcggctcactccttggcgcctgcctgatcctccaaatcaccacaggactattcctagccatacactactcaccagacgcctcaaccgccttttcatcaatcgcccacatcactcgagacgtaaattatggctgaatcatccgctaccttcacgccaatggcgcctcaatattctttatctgcctcttcctacacatcgggcgaggcctatattacggatcatttctctactcagaaacctgaaacatcggcattatcctcctgcttgcaactatagcaacagccttcataggctatgtcctcccgtgaggccaaatatcattctgaggggccacagtaattacaaacttactatccgccatcccatacattgggacagacctagttcaatgaatctgaggaggctactcagtagacagtcccaccctcacacgattctttacctttcacttcatcttacccttcattattgcagccctagcagcactccacctcctattcttgcacgaaacgggatcaaacaaccccctaggaatcacctcccattccgataaaatcaccttccacccttactacacaatcaaagacgccctcggcttacttctcttccttctctccttaatgacattaacactattctcaccagacctcctaggcgacccagacaattataccctagccaaccccttaaacacccctccccacatcaagcccgaatgatatttcctattcgcctacacaattctccgatccgtccctaacaaactaggaggcgtccttgccctattactatccatcctcatcctagcaataatccccatcctccatatatccaaacaacaaagcataatatttcgcccactaagccaatcactttattgactcctagccgcagacctcctcattctaacctgaatcggaggacaaccagtaagctacccttttaccatcattggacaagtagcatccgtactatacttcacaacaatcctaatcctaataccaactatctccctaattgaaaacaaaatactcaaatgggcctgtccttgtagtataaactaatacaccagtcttgtaaaccggagacgaaaacctttttccaaggacaaatcagagaaaaagtctttaactccaccattagcacccaaagctaagattctaatttaaactattctctgttctttcatggggaagcagatttgggtaccacccaagtattgactcacccatcaacaaccgctatgtatttcgtacattactgccagccaccatgaatattgtacggtaccataaatacttgaccacctgtagtacataaaaacccaacccacatcaaaccccccccccccatgcttacaagcaagtacagcaatcaaccttcaactatcacacatcaactgcaactccaaagccacccctcacccactaggataccaacaaacctacccacccttaacagtacatagtacataaagtcatttaccgtacatagcacattacagtcaaatcccttctcgtccccatggatgacccccctcagataggggtcccttgaccaccatcctccgtgaaatcaatatcccgcacaagagtgctactctcctcgctccgggcccataacacttgggggtagctaaagtgaactgtatccgacatctggttcctacttcagggccataaagcctaaatagcccacacgttccccttaaataagacatcacgatg
